(19) United States
(12) Patent Application Publication
(10) Pub. No.: US 2026/0176702 A1
(43) Pub. Date: Jun. 25, 2026

(54) METHODS, TREATMENT, AND COMPOSITIONS FOR CHARACTERIZING THYROID NODULE

(71) Applicant: City of Hope, Duarte, CA (US)

(72) Inventors: Maria A. Hahn, Duarte, CA (US); John H. Yim, San Marino, CA (US); Yuman Fong, Duarte, CA (US); Arthur X. Li, Covina, CA (US); Xiwei Wu, Diamond Bar, CA (US)

(21) Appl. No.: 19/256,055

(22) Filed: Jun. 30, 2025

Related U.S. Application Data
(63) Continuation of application No. 17/813,904, filed on Jul. 20, 2022, now Pat. No. 12,391,993.
Application No. 17/813,904 is a continuation of application No. 15/217,645, filed on Jul. 22, 2016, now Pat. No. 11,505,829.
(60) Provisional application No. 62/196,678, filed on Jul. 24, 2015.

(51) Int. Cl. C12Q 1/6886

(52) U.S. Cl. CPC C12Q 1/6886; C12Q 2600/118; C12Q 2600/154

(57) ABSTRACT

The current disclosure provides, inter alia, method of determining benign nodules from thyroid cancer in a subject that is found to have a thyroid nodule, method of treating thyroid cancer in a subject detected to have thyroid cancer by the method of the current disclosure, compositions for determining benign nodules from thyroid cancer in a subject, and kits including reagents and composition for determining benign nodules from thyroid cancer in a subject.

### RELATED APPLICATION

[0001] This application is a continuation of U.S. application Ser. No. 17/813,904, filed Jul. 20, 2022, now U.S. Pat. No. 12,391,993, which is a continuation of U.S. application Ser. No. 15/217,645, filed Jul. 22, 2016, now U.S. Pat. No. 11,505,829, which claims the benefit of priority under 35 U.S.C. § 119(e) to U.S. Provisional Application No. 62/196,678, filed Jul. 24, 2015, the contents of which are incorporated herein by reference in their entirety.

### REFERENCE TO AN ELECTRONIC SEQUENCE LISTING

[0002] The content of the electronic sequence listing (048440-573C02US_SL_ST26.xml; Size: 18,308,121 bytes; and Date of Creation: Dec. 30, 2025) is hereby incorporated by reference in its entirety.

### BACKGROUND OF THE DISCLOSURE

[0003] Palpable thyroid nodules are typically detected in 2-6% of the population, and this increases to 19-35% with ultrasound detection (Dean D S and Gharib H. Best Pract Res Clin Endocrinol Metab 2008; 22:901-11). Approximately 5-15% of thyroid nodules are found to be thyroid cancer, making the existence of a nodule clinically relevant. Fine needle aspiration (FNA) with cytology is currently the standard diagnostic procedure used to evaluate thyroid nodules. However, in as many as 30% of cases, the cytological diagnosis is indeterminate because of cytological features that overlap between benign and malignant nodules. For most indeterminate cases half or the entire thyroid is resected, yet as many as 80% of these cases are found to be benign.

[0004] Most thyroid nodules do not cause symptoms. Often, thyroid nodules are discovered incidentally during a routine physical examination or on imaging tests like CT scans or neck ultrasound done for completely unrelated reasons. Occasionally, patients themselves find thyroid nodules by noticing a lump in their neck while looking in a mirror, buttoning their collar, or fastening a necklace. Abnormal thyroid function tests may occasionally be the reason a thyroid nodule is found. Thyroid nodules may produce excess amounts of thyroid hormone causing hyperthyroidism. However, most thyroid nodules, including those that cancerous, are actually non-functioning, meaning current diagnostic test readouts such as the level of Thyroid-Stimulating Hormone (TSH) are normal. Rarely, patients with thyroid nodules may complain of pain in the neck, jaw, or ear. If a nodule is large enough to compress the windpipe or esophagus, it may cause difficulty with breathing, swallowing, or cause a “tickle in the throat”. Even less commonly, hoarseness can be caused if the nodule invades the nerve that controls the vocal cords but this is usually related to thyroid cancer.

[0005] Molecular testing is a potential alternative to cytopathological examination. However, FNA molecular testing based on DNA mutations frequently fails. There are two major reasons for this failure: (i) not all papillary thyroid carcinoma (PTC) specimens are characterized by a common set of cancer associated mutations, and (ii) cancer associated mutations like KRAS are frequently found in benign thyroid nodule (BTN) specimens. At the same time commercial diagnostic tests for FNA based on transcriptional activity and currently implemented in clinical practice is complicated due to RNA instability and associated with only an approximately 50% positive predictive value. Thus, there is an urgent need for highly sensitive, low cost biomarker panels that can accurately diagnose thyroid nodules from FNA biopsies.

### BRIEF SUMMARY OF THE DISCLOSURE

[0006] The present subject matter provides, inter alia, a method of determining benign nodules from thyroid cancer in a subject that is found to have a thyroid nodule, a method of treating thyroid cancer in a subject detected to have thyroid cancer, compositions for determining benign nodules from thyroid cancer in a subject, and kits including reagents and compositions for determining benign nodules from thyroid cancer in a subject.

[0007] In embodiments, aspects of the present subject matter provide a method of detecting methylation or unmethylation of a thyroid nodule DNA of a subject, the method including: (i) isolating DNA from a thyroid nodule of the subject thereby forming isolated thyroid nodule DNA, (ii) contacting the isolated thyroid nodule DNA with a bisulfite salt (such as sodium bisulfite) thereby forming a reacted thyroid nodule DNA, (iii) detecting the presence or absence of uracil in the reacted thyroid nodule DNA at a methylation site set forth in Table 1, thereby detecting methylation or unmethylation of the thyroid nodule DNA of the subject.

[0008] Also provided is a method of determining a thyroid cancer or risk of developing thyroid cancer in a subject in need thereof. The method includes isolating DNA from a thyroid nodule of the subject thereby forming isolated thyroid nodule DNA. The isolated thyroid nodule DNA is contacted with sodium bisulfite thereby forming a reacted thyroid nodule DNA. The presence or absence of uracil is detected in the reacted thyroid nodule DNA at a methylation site set forth in Table 1 thereby determining thyroid cancer in the subject.

[0009] In embodiments, provided herein is a method of treating thyroid cancer in a subject by administering to the subject an active agent for treating thyroid cancer. The method includes identifying the subject for treatment by a method including isolating DNA from a thyroid nodule of the subject thereby forming isolated thyroid nodule DNA. The isolated thyroid nodule DNA is contacted with sodium bisulfite thereby forming a reacted thyroid nodule DNA. The presence or absence of uracil in the reacted thyroid nodule DNA is detected at a methylation site set forth in Table 1 thereby determining thyroid cancer in the subject.

[0010] Also included herein is a deoxyribonucleic acid 5 to 100, 5 to 200, 5 to 300, or at least about 5, 50, 100, 150, 200, 250, 300, or more nucleotides in length including a uracil-containing sequence identical to at least a 5 contiguous nucleotides within a sequence including SEQ ID NO:1 to SEQ ID NO:550.

[0011] In embodiments, provided herein is an oligonucleotide 5 to 100, 5 to 200, 5 to 300, or at least about 5, 50, 100, 150, 200, 250, 300, or more nucleotides in length including identical or complementary to at least 5, 10, 20, 25, 50, 100, 150, 200, 250, or 300 contiguous nucleotides within a sequence including SEQ ID NO:1 to SEQ ID NO:550.

[0012] Aspects of the present subject matter also include a deoxyribonucleic acid including SEQ ID NO: 551 to SEQ ID NO: 782, in which the nucleic acid is hybridized to a complementary DNA sequence having uridine or cytosine.

[0013] Also provided is a kit including a plurality (e.g., at least about 10, 20, 40, 50, 100, 150, 200, 225, or 232) nucleic acids each independently comprising SEQ ID NO: 551 to SEQ ID NO: 782, in which the nucleic acids do not simultaneously include the same sequence of SEQ ID NO: 551 to SEQ ID NO: 782.

[0014] Aspects of the present subject matter also provide a system for detecting methylation or unmethylation of a thyroid nodule deoxyribonucleic acid (DNA) of a subject. The system can include at least one processor; and at least one memory including program code which when executed by the at least one memory provides operations. The operations can include: isolating DNA from a thyroid nodule of the subject thereby forming isolated thyroid nodule DNA; contacting the isolated thyroid nodule DNA with bisulfite salt thereby forming a reacted thyroid nodule DNA; detecting a presence or absence of uracil in the reacted thyroid nodule DNA at a plurality of methylation sites set forth in Table 1, thereby detecting methylation or unmethylation of the thyroid nodule DNA of the subject; and generating a diagnosis for the subject based at least in part on the presence or absence of uracil in the reacted thyroid nodule DNA at the plurality of methylation sites set forth in Table 1; and providing, via a user interface, the diagnosis for the subject.

### BRIEF DESCRIPTION OF THE DRAWINGS

[0015] FIGS. 1A-1B show a drawing defining a threshold for thyroid adenoma specific signature for individual cytosine regions. FIG. 1A: Adenoma specific hypomethylation signature. FIG. 1B: Adenoma specific hypermethylation signature.

[0016] FIGS. 2A and 2B show 364 cytosines associated with BTN or PTC specific DNA methylation changes. Legend (FIG. 2A): Cancer specific signature (gray); benign specific signature (black). FIG. 2B: 364 CpG sites associated with benign- and thyroid cancer-specific DNA methylation changes. Each row represents a single cytosine. Each column represents tissue specimen. Dark gray, light gray and black indicate high, low and medium levels of DNA methylation, respectively. Abbreviation “A” is for thyroid benign nodule and “T” is for thyroid cancer.

[0017] FIGS. 3A-3C depict exemplary thyroid cancer diagnostics based on DNA methylation signatures. FIG. 3A: Thyroid cancer diagnostics based on benign DNA methylation signature, cancer DNA methylation signature and cancer risk scores. FIG. 3B: DNA methylation signatures for malignant and benign thyroid nodules according to leave one-out-cross-validation technique. Specimens with indeterminate epigenetic signature are underlined. Abbreviation “A” is for thyroid benign nodule and “T” is for thyroid cancer. FIG. 3C: Algorithm for the diagnosis prediction based on BTN, PTC and cancer risk scores.

[0018] FIG. 4 depicts a block diagram illustrating an exemplary thyroid cancer diagnostics system.

[0019] FIG. 5 depicts a flowchart illustrating an exemplary process for diagnosing thyroid cancer.

[0020] FIG. 6 depicts a flowchart illustrating an exemplary process for diagnosing thyroid cancer.

### DETAILED DESCRIPTION OF THE DISCLOSURE

[0021] Provided herein are, inter alia, compositions, methods, kits, and systems for detecting unmethylated DNA. In embodiments, compositions, methods, kits, and systems for detecting unmethylated DNA from thyroid nodule are included herein.

[0022] The following definitions are included for the purpose of understanding the present subject matter and for constructing the appended patent claims. Abbreviations used herein have their conventional meaning within the chemical and biological arts.

### Definitions

[0023] The term “thyroid nodule” is used according to its plain ordinary meaning and refers to an abnormal growth of thyroid cells. The abnormal growth may form, for example, a mass or lump within or on the thyroid gland. The mass or lump may be fluid-filled or solid. The thyroid nodules may be benign (noncancerous) or cancerous.

[0024] Thyroid fine needle aspiration biopsy (FNA or FNAB): For a fine needle biopsy, a needle is used to withdraw cells from a thyroid nodule. In embodiments, several samples are taken from different parts of the nodule, e.g., to increase the chance of finding cancerous cells if they are present. In embodiments, a sample is taken from one part of the nodule. In embodiments, examination of the cells under a microscope is not necessary. In non-limiting examples, the needle used for FNA is a 20-35 gauge needle (such as a 23, 24 or 25 gauge needle).

[0025] The term “disease” refers to any deviation from the normal health of a mammal and includes a state when disease symptoms are present, as well as conditions in which a deviation (e.g., infection, gene mutation, genetic defect, etc.) has occurred, but symptoms are not yet manifested. According to the present disclosure, the methods disclosed herein are suitable for use in a patient that is a member of the Vertebrate class, Mammalia, including, without limitation, primates, livestock and domestic pets (e.g., a companion animal). Typically, a patient will be a human patient. As used herein, a “symptom” of a disease includes and clinical or laboratory manifestation associated with the disease, and is not limited to what a subject can feel or observe.

[0026] The terms “subject,” “patient,” “individual,” and the like as used herein are not intended to be limiting and can be generally interchanged. That is, an individual described as a “patient” does not necessarily have a given disease, but may be merely seeking medical advice.

[0027] The term “subject” as used herein includes all members of the animal kingdom that may suffer from the indicated disorder. In some aspects, the subject is a mammal, and in some aspects, the subject is a human.

[0028] It must be noted that as used herein and in the appended embodiments, the singular forms “a,” “an,” and “the” include the plural reference unless the context clearly dictates otherwise. Thus, for example, a reference to “a disease,” “a disease state”, “a nucleic acid” or “a CpG site” is a reference to one or more such embodiments, and includes equivalents thereof known to those skilled in the art and so forth.

[0029] Throughout the description and claims of this specification the word “comprise” and other forms of the word, such as “comprising” and “comprises,” means including but not limited to, and is not intended to exclude, for example, other components.

[0030] A “control” sample or value refers to a sample that serves as a reference, usually a known reference, for comparison to a test sample. For example, a test sample can be taken from a patient suspected or at risk of having thyroid cancer and compared to samples from a known thyroid cancer patient, or a known normal (non-disease) individual. A control can also represent an average value gathered from a population of similar individuals, e.g., thyroid cancer patients or healthy individuals with a similar medical background, same age, weight, etc. A control value can also be obtained from the same individual, e.g., from an earlier-obtained sample, prior to disease, or prior to treatment. One of skill will recognize that controls can be designed for assessment of any number of parameters.

[0031] One of skill in the art will understand which controls are valuable in a given situation and be able to analyze data based on comparisons to control values. Controls are also valuable for determining the significance of data. For example, if values for a given parameter are widely variant in controls, variation in test samples will not be considered as significant.

[0032] The term “diagnosis” refers to a relative probability that a disease is present in the subject. Similarly, the term “prognosis” refers to a relative probability that a certain future outcome may occur in the subject. For example, in the context of the present disclosure, prognosis can refer to the likelihood that an individual will develop a disease, or the likely severity of the disease (e.g., severity of symptoms, rate of functional decline, survival, etc.). The terms are not intended to be absolute, as will be appreciated by any one of skill in the field of medical diagnostics.

[0033] “Nucleic acid” or “oligonucleotide” or “polynucleotide” or grammatical equivalents used herein means at least two nucleotides covalently linked together. Oligonucleotides are typically from about 5, 6, 7, 8, 9, 10, 12, 15, 25, 30, 40, 50 or more nucleotides in length, up to about 100 nucleotides in length. Nucleic acids, including ribonucleic acids (RNA) and deoxyribonucleic acids (DNA), and polynucleotides are a polymers of any length, including longer lengths, e.g., 200, 300, 500, 1000, 2000, 3000, 5000, 7000, 10,000, etc. A nucleic acid of the present invention will generally contain phosphodiester bonds, although in some cases, nucleic acid analogs are included that may have alternate backbones, comprising, e.g., phosphoramidate, phosphorothioate, phosphorodithioate, or O-methylphophoroamidite linkages (see Eckstein, Oligonucleotides and Analogues: A Practical Approach, Oxford University Press); and peptide nucleic acid backbones and linkages. Other analog nucleic acids include those with positive backbones; non-ionic backbones, and non-ribose backbones, including those described in U.S. Pat. Nos. 5,235,033 and 5,034,506, and Chapters 6 and 7, ASC Symposium Series 580, Carbohydrate Modifications in Antisense Research, Sanghui & Cook, eds. Nucleic acids containing one or more carbocyclic sugars are also included within one definition of nucleic acids. Modifications of the ribose-phosphate backbone may be done for a variety of reasons, e.g., to increase the stability and half-life of such molecules in physiological environments or as probes on a biochip. Mixtures of naturally occurring nucleic acids and analogs can be made; alternatively, mixtures of different nucleic acid analogs, and mixtures of naturally occurring nucleic acids and analogs may be made.

[0034] The term “bp” and the like refer, in the usual and customary sense, to the indicated number of base pairs.

[0035] The terms “identical” or percent “identity,” in the context of two or more nucleic acids (e.g., genomic sequences or subsequences or coding sequences) or polypeptide sequences, refer to two or more sequences or subsequences that are the same or have a specified percentage of amino acid residues or nucleotides that are the same (i.e., 50%, 55%, 60%, 65%, 70%, 75%, 80%, 85%, 90%, 91%, 92%, 93%, 94%, 95%, 96%, 97%, 98%, 99%, or more identity over a specified region), when compared and aligned for maximum correspondence over a comparison window, or designated region as measured using one of the following sequence comparison algorithms or by manual alignment and visual inspection. Such sequences are then said to be “substantially identical.” This definition also refers to the compliment of a test sequence. Optionally, the identity exists over a region that is at least about 10 to about 100, about 20 to about 75, about 30 to about 50 amino acids or nucleotides in length.

[0036] An example of algorithms suitable for determining percent sequence identity and sequence similarity are the BLAST and BLAST 2.0 algorithms, which are described in Altschul et al., Nuc. Acids Res. 25:3389-3402 (1977) and Altschul et al., J. Mol. Biol. 215:403-410 (1990), respectively. As will be appreciated by one of skill in the art, the software for performing BLAST analyses is publicly available through the website of the National Center for Biotechnology Information.

[0037] A “label” or a “detectable moiety” is a composition detectable by spectroscopic, photochemical, biochemical, immunochemical, chemical, or other physical means. For example, useful labels include ³²P, fluorescent dyes, electron-dense reagents, enzymes (e.g., as commonly used in an ELISA), biotin, digoxigenin, or haptens and proteins or other entities which can be made detectable, e.g., by incorporating a radiolabel into a peptide or antibody specifically reactive with a target peptide. Any method known in the art for conjugating an antibody to the label may be employed, e.g., using methods described in Hermanson, Bioconjugate Techniques 1996, Academic Press, Inc., San Diego.

[0038] The term “associated” or “associated with” in the context of a substance (e.g., level of uracil or methylation level in a thyroid nodule) does not necessarily mean that the disease is caused by (in whole or in part), or a symptom of the disease is caused by (in whole or in part) the substance or substance activity or function (i.e., level of uracil in the regions of chromosomes assayed).

[0039] The term “unmethylated DNA” or “demethylated DNA” means DNA that lacks a methyl group conjugated to cytosine in a segment of the DNA. DNA methylation typically occurs in a CpG dinucleotide context. DNA methylation at the 5′ position of cytosine may have the specific effect on gene expression in vivo. DNA methylation may also form the basis of epigenetic structure, which typically enables a single cell to grow into multiple organs or perform multiple functions.

[0040] The CpG sites or CG sites are regions of DNA where a cytosine nucleotide occurs next to a guanine nucleotide in the linear sequence of bases along its length. “CpG” is shorthand for “—C-phosphate-G-”, that is, cytosine and guanine separated by only one phosphate; phosphate links any two nucleosides together in DNA. The “CpG” notation is used to distinguish this linear sequence from the CG base-pairing of cytosine and guanine. The CpG notation can also be interpreted as the cytosine being 5′ prime to the guanine base.

[0041] In embodiments, methylation is detected based on a chemical reaction of sodium bisulfite with DNA that converts unmethylated cytosines of CpG dinucleotides to uracil or UpG. However, methylated cytosine is not converted in this process, the methods described herein allow determination of methylation status as methylated or unmethylated.

### Evaluation of Thyroid Fine Needle Biopsies by Visual Examination

[0042] Cells in a thyroid vine needle biopsy sample may be examined under a microscope by, e.g., a pathologist. The report of a thyroid fine needle biopsy followed by examination under a microscope will usually indicate one of the following findings:
[0043] 1. The nodule is benign (noncancerous). This result is obtained in up to 80% of biopsies. The risk of overlooking a cancer when the biopsy is benign is generally less than 3 in 100 tests or 3%. This is even lower when the biopsy is reviewed by an experienced pathologist at a major medical center. Generally, benign thyroid nodules do not need to be removed unless they are causing symptoms like choking or difficulty swallowing. Follow up ultrasound exams are important. Occasionally, another biopsy may be required in the future, especially if the nodule grows over time.
[0044] 2. The nodule is malignant (cancerous) or suspicious for malignancy. A malignant result is obtained in about 5% of biopsies and is most often due to papillary cancer, which is the most common type of thyroid cancer. A malignant diagnosis has a >99% risk of cancer in the nodule. A suspicious biopsy has a 50-75% risk of cancer in the nodule. These diagnoses require surgical removal of the thyroid after consultation with the endocrinologist and surgeon.
[0045] 3. The nodule is indeterminate. This is actually a group of several diagnoses that may occur in up to 30% of cases. An indeterminate finding means that even though an adequate number of cells was removed during the fine needle biopsy, examination with a microscope cannot reliably classify the result as benign or cancer. The biopsy may be indeterminate because the nodule is described as a Follicular Lesion. These nodules are cancerous 20-30% of the time. However, under the current state of the art, the diagnosis can only be made by surgery. Because the odds that the nodule is not a cancer are much better by surgery (70-80%), only the side of the thyroid with the nodule is usually removed. If a cancer is found, the remaining thyroid gland is usually removed as well. If the surgery confirms that no cancer is present, no additional surgery to “complete” the thyroidectomy is necessary.

[0046] The biopsy may also be indeterminate because the cells from the nodule have features that cannot be placed in one of the other diagnostic categories. This diagnosis is called atypia, or a follicular lesion of undetermined significance. Diagnoses in this category will contain cancer rarely, so repeat evaluation with FNA or surgical biopsy to remove half of the thyroid containing the nodule is usually recommended.
[0047] 4. The biopsy may also be non-diagnostic or inadequate. This result indicates that not enough cells were obtained to make a diagnosis but is a common result if the nodule is a cyst. These nodules may require reevaluation with second fine needle biopsy, or may need to be removed surgically depending on the clinical judgment of the doctor.

[0048] Methods, compositions, kits, and systems provided herein provide significant advantages over the visual examination of biopsies.

### Method of Detection Methylation Status of a Thyroid Nodule DNA

[0049] In an aspect, provided herein is a method of detecting methylation or unmethylation of a thyroid nodule DNA of a subject. The method includes: (i) isolating a thyroid nodule DNA molecule from a thyroid nodule of the subject thereby forming an isolated thyroid nodule DNA molecule, (ii) contacting the isolated thyroid nodule DNA molecule with a bisulfite salt (such as sodium bisulfite) thereby forming a reacted thyroid nodule DNA molecule, (iii) detecting the presence or absence of uracil in the reacted thyroid nodule DNA molecule at a methylation site set forth in Table 1, thereby detecting methylation or unmethylation of the thyroid nodule DNA molecule of the subject. In embodiments, contacting the isolated thyroid nodule DNA with a bisulfite salt comprises adding a solution comprising the bisulfite salt to a solution comprising the isolated single stranded DNA.

[0050] In an aspect, provided herein is a method of detecting methylation or unmethylation of a thyroid nodule DNA molecule of a subject comprising (i) isolating a plurality of thyroid nodule DNA molecules from the thyroid nodule of the subject thereby forming a plurality of isolated thyroid nodule DNA molecules, (ii) contacting the plurality of isolated thyroid nodule DNA molecules with the bisulfite salt thereby forming a plurality of reacted thyroid nodule DNA molecules, (iii) detecting the level of reacted thyroid nodule DNA molecules in the plurality of reacted thyroid nodule DNA molecules having a uracil at a methylation site set forth in Table 1, thereby detecting the level of methylation or unmethylation in the plurality of thyroid nodule DNA molecules of the subject.

[0051] In an aspect, provided herein is a method of detecting methylation or unmethylation of a thyroid nodule DNA molecule of a subject comprising (i) isolating a plurality of thyroid nodule DNA molecules from the thyroid nodule of the subject thereby forming a plurality of isolated thyroid nodule DNA molecules, (ii) contacting the plurality of isolated thyroid nodule DNA molecules with the bisulfite salt thereby forming a plurality of reacted thyroid nodule DNA molecules, (iii) detecting the presence or absence of uracil in a reacted thyroid nodule DNA molecule at a methylation site set forth in Table 1, thereby detecting methylation or unmethylation of the thyroid nodule DNA molecule of the subject.

[0052] In an aspect, provided herein is a method of detecting methylation or unmethylation of a thyroid nodule DNA of a subject. The method includes: (i) isolating a thyroid nodule DNA molecule from a thyroid nodule of the subject thereby forming an isolated thyroid nodule DNA molecule, (ii) contacting the isolated thyroid nodule DNA molecule with a bisulfite salt (such as sodium bisulfite) thereby forming a reacted thyroid nodule DNA molecule, (iii) amplifying the reacted thyroid nodule DNA molecule thereby forming a reacted thyroid nodule DNA amplicon molecule, (iv) detecting the presence or absence of thymidine in a reacted thyroid nodule DNA amplicon molecule at a methylation site set forth in Table 1, thereby detecting methylation or unmethylation of the thyroid nodule DNA molecule of the subject. In embodiments, contacting the isolated thyroid nodule DNA with a bisulfite salt comprises adding a solution comprising the bisulfite salt to a solution comprising the isolated single stranded DNA.

[0053] In an aspect, provided herein is a method of detecting methylation or unmethylation of a thyroid nodule DNA molecule of a subject comprising (i) isolating a plurality of thyroid nodule DNA molecules from the thyroid nodule of the subject thereby forming a plurality of isolated thyroid nodule DNA molecules, (ii) contacting the plurality of isolated thyroid nodule DNA molecules with the bisulfite salt thereby forming a plurality of reacted thyroid nodule DNA molecules, (iii) amplifying the plurality of reacted thyroid nodule DNA molecules thereby forming a plurality of reacted thyroid nodule DNA amplicon molecules, (iv) detecting one or more thyroid nodule DNA amplicon molecules within the plurality of reacted thyroid nodule DNA amplicon molecules having a thymidine at a methylation site set forth in Table 1, thereby detecting methylation or unmethylation of the thyroid nodule DNA molecule of the subject.

[0054] In embodiments, detecting one or more thyroid nodule DNA amplicon molecules comprises detecting the level of one or more one or more thyroid nodule DNA amplicon molecules. In embodiments, detecting one or more thyroid nodule DNA amplicon molecules comprises detecting the level of reacted thyroid nodule DNA amplicon molecules in the plurality of reacted thyroid nodule DNA amplicon molecules having a thymidine at a methylation site set forth in Table 1, thereby detecting the level of methylation or unmethylation in the plurality of thyroid nodule DNA molecules of the subject.

[0055] In embodiments, detecting a level includes determining the number (e.g. quantitating) or molecules having, e.g., a thymidine or a uracil. In embodiments, detecting a level includes detecting the portion or proportion of a population or plurality of molecules having, e.g., a thymidine or a uracil.

[0056] In embodiments, the isolated thyroid nodule DNA sample is treated with a bisulfite reagent, e.g., a bisulfite salt (i.e., a process called DNA bisulfite conversion). Non-limiting examples of bisulfite salts include sodium bisulfite, potassium bisulfite, ammonium bisulfite, magnesium bisulfite, sodium metabisulfite, potassium metabisulfite, ammonium metabisulfite and magnesium metabisulfite. Bisulfite salts such as sodium bisulfite or ammonium bisulfite can convert cytosine to uracil and leave 5-methylcytosine (5-mC) the same. Thus after bisulfite treatment methylated cytosine in the DNA remains the same and unmodified cytosines will be changed to uracil. The bisulfite treatment can be performed by using the methods disclosed herein or in the art, and/or with commercial kits such as the Bisulflash DNA Modification Kit (Epigentek) and Imprint DNA Modification Kit (Sigma). For achieving the optimal bisulfite conversion, the bisulfite reaction should be carried out in an appropriate concentration of bisulfite reagents, appropriate temperature and appropriate reaction time period. A reagent such as potassium chloride that reduces thermophilic DNA degradation could also be used in bisulfite treatment so that the DNA bisulfite process can be much shorter without interrupting a completed conversion of unmethylated cytosine to uracil and without a significant thermodegradation of DNA resulted from depurination. In embodiments, a commercially available bisulfite treatment kit is used. A non-limiting example of such a kit is EZ DNA Methylation-Gold™ Kit (Zymo Research, Irvine, CA, USA).

[0057] In embodiments, once DNA bisulfite conversion is complete, DNA is captured, desulphonated and washed. In embodiments, the bisulfite-treated DNA can be captured by, e.g., a solid matrix selected from silica salt, silica dioxide, silica polymers, magnetic beads, glass fiber, celite diatoms and nitrocellulose in the presence of high concentrations of chaotropic or non-chaotropic salts. In embodiments, the bisulfite-treated DNA is further desulphonated with an alkalized solution, preferably sodium hydroxide at concentrations from 10 mM to 300 mM. In embodiments, the DNA is then eluted and collected into a capped microcentrifuge tube. Non-limiting examples of elution solutions include DEPC-treated water and TE buffer (10 mM Tris-HCL, pH 8.0, and 1 mM EDTA).

[0058] In embodiments, the reacted thyroid nodule DNA resulting from bisulfite treatment is amplified. In embodiments, detecting the presence or absence of uracil in reacted thyroid nodule DNA molecule at a methylation site comprises amplifying the reacted thyroid nodule DNA molecule thereby forming a reacted thyroid nodule DNA amplicon molecule, and detecting the presence or absence of thymidine in a reacted thyroid nodule DNA amplicon molecule at the methylation site. In embodiments, a polymerase chain reaction (PCR) method is used for amplifying the reacted thyroid nodule DNA. PCR methods are known to those of ordinary skill in the art. In general, the PCR reactions can be set up by adding sample, dNTPs, and appropriate polymerase such as Taq polymerase, primers, and a buffer.

[0059] In embodiments, the method of detecting methylation or unmethylation of a thyroid nodule DNA of a subject, includes detecting methylation or unmethylation at a plurality of methylation sites set forth in Table 1. In embodiments, the plurality of methylation sites comprises at least about 2, 3, 4, 5, 10, 25, 50, 75, 80, 85, 90, 100, 150, 200, 250, 300, 350, 400, 450, 500, or 550, or 5-550 methylation sites. In embodiments, the plurality of methylation sites comprises less than about 550, 500, 450, 400, 350, 300, 250, 200, 150, 100, 90, 85, 80, 75, 50, 25, or 10 methylation sites. In embodiments, the plurality of methylation sites is about 5, 6, 7, 8, 9, 10, 11, 12, 13, 14, 15, 16, 17, 18, 19, 20, 25, 50, 75, 80, 85, 90, 100, 150, 200, 250, 300, 350, 400, 450, 500, or 550, or 5-550 methylation sites. In embodiments, the plurality of methylation sites includes two or more methylation sites set forth in Table 1 and no other methylation sites.

[0060] In embodiments, the method includes detecting methylation or unmethylation of at least 1, 2, 3, 4, 5, 6, 7, 8, 9, 10, 50, 100, 200, 300, 400, or 500 of the following sites: Chromosome 1 (Chr1) position 2996653, Chr1 position 11979164, Chr1 position 12655938, Chr1 position 16450525, Chr1 position 16450542, Chr1 position 16450545, Chr1 position 16469987, Chr1 position 17494491, Chr1 position 25473203, Chr1 position 27640460, Chr1 position 29565080, Chr1 position 38493013, Chr1 position 38493030, Chr1 position 38493074, Chr1 position 46713777, Chr1 position 46914121, Chr1 position 46955744, Chr1 position 55008344, Chr1 position 109816092, Chr1 position 109816111, Chr1 position 110074669, Chr1 position 110074681, Chr1 position 110074685, Chr1 position 150949856, Chr1 position 150949857, Chr1 position 153540282, Chr1 position 155162704, Chr1 position 155162714, Chr1 position 156676611, Chr1 position 157611881, Chr1 position 182205324, Chr1 position 204118999, Chr1 position 206741875, Chr1 position 206741989, Chr1 position 212587673, Chr1 position 212841198, Chr1 position 223403952, Chr1 position 233430972, Chr1 position 234342767, Chromosome 2 (Chr2) position 3454277, Chr2 position 8793724, Chr2 position 20412441, Chr2 position 42329402, Chr2 position 42329494, Chr2 position 55289272, Chr2 position 65064865, Chr2 position 70823641, Chr2 position 73143689, Chr2 position 74454110, Chr2 position 122014529, Chr2 position 128158884, Chr2 position 128158910, Chr2 position 203114171, Chr2 position 218221671, Chr2 position 219745335, Chr2 position 238341465, Chr2 position 238341542, Chr2 position 238341546, Chr2 position 238774763, Chromosome 3 (Chr3) position 13323642, Chr3 position 14180153, Chr3 position 45209073, Chr3 position 45209207, Chr3 position 52525100, Chr3 position 62589658, Chr3 position 65388317, Chr3 position 65388388, Chr3 position 73599302, Chr3 position 195636893, Chr3 position 197093846, Chromosome 4 (Chr4) position 3743223, Chr4 position 5755716, Chr4 position 5755717, Chr4 position 5755728, Chr4 position 5755729, Chr4 position 5755734, Chr4 position 8372861, Chr4 position 57548289, Chromosome 5 (Chr5) position 1118280, Chr5 position 34564389, Chr5 position 73871907, Chr5 position 78013596, Chr5 position 78013643, Chr5 position 137802650, Chr5 position 139051189, Chr5 position 167838221, Chr5 position 177541401, Chr5 position 180018672, Chr5 position 180101026, Chromosome 6 (Chr6) position 3394325, Chr6 position 3887581, Chr6 position 7236568, Chr6 position 7728692, Chr6 position 34203617, Chr6 position 37751320, Chr6 position 41410682, Chr6 position 41438516, Chr6 position 41438575, Chr6 position 43464150, Chr6 position 158734279, Chromosome 7 (Chr7) position 989235, Chr7 position 2673543, Chr7 position 73508602, Chr7 position 105079565, Chr7 position 105079631, Chr7 position 151425103, Chr7 position 151425104, Chromosome 8 (Chr8) position 11764017, Chr8 position 21647308, Chr8 position 22548399, Chr8 position 22548483, Chr8 position 133570537, Chr8 position 141320393, Chr8 position 141320410, Chromosome 9 (Chr9) position 6566568, Chr9 position 16197862, Chr9 position 34591313, Chr9 position 98225096, Chr9 position 126126741, Chr9 position 132083428, Chr9 position 136077410, Chr9 position 139655018, Chr9 position 140205985, Chr9 position 140205985, Chr9 position 140205997, Chromosome 10 (Chr10) position 3929071, Chr10 position 30047012, Chr10 position 79702989, Chr10 position 87984905, Chr10 position 94838789, Chr10 position 102131187, Chr10 position 104196489, Chr10 position 111766879, Chr10 position 112258886, Chr10 position 112258984, Chr10 position 112259015, Chr10 position 116391763, Chr10 position 120011530, Chr10 position 126172714, Chr10 position 126172747, Chromosome 11 (Chr11) position 556355, Chr11 position 821282, Chr11 position 12188937, Chr11 position 12188948, Chr11 position 12188995, Chr11 position 36057726, Chr11 position 48070143, Chr11 position 48070163, Chr11 position 48070166, Chr11 position 48070174, Chr11 position 65158294, Chr11 position 65158342, Chr11 position 65297089, Chr11 position 66104481, Chr11 position 66104485, Chr11 position 66104578, Chr11 position 68608767, Chr11 position 70236292, Chr11 position 70236320, Chr11 position 70236331, Chr11 position 115530032, Chr11 position 117950310, Chr11 position 117950329, Chr11 position 117950361, Chr11 position 117950362, Chr11 position 119293593, Chromosome 12 (Chr12) position 679803, Chr12 position 26039132, Chr12 position 31004558, Chr12 position 45610695, Chr12 position 45610701, Chr12 position 45610702, Chr12 position 45610706, Chr12 position 50286016, Chr12 position 52243258, Chr12 position 52243286, Chr12 position 54145732, Chr12 position 54145741, Chr12 position 54145825, Chr12 position 56115043, Chr12 position 66262229, Chr12 position 66262230, Chr12 position 66262233, Chr12 position 66262234, Chr12 position 77266621, Chr12 position 117580102, Chr12 position 123435962, Chr12 position 123436011, Chr12 position 123436065, Chr12 position 123540893, Chromosome 13 (Chr13) position 20735797, Chr13 position 23500419, Chr13 position 46771519, Chr13 position 46771520, Chr13 position 53313426, Chr13 position 113807393, Chromosome 14 (Chr14) position 38599118, Chr14 position 69170010, Chr14 position 75701632, Chr14 position 75701643, Chr14 position 90850454, Chr14 position 97524282, Chr14 position 103541602, Chr14 position 103768055, Chr14 position 104209000, Chr14 position 104209068, Chr14 position 104354645, Chr14 position 104360487, Chromosome 15 (Chr15) position 41068807, Chr15 position 61152225, Chr15 position 61152253, Chr15 position 61152313, Chr15 position 65186440, Chr15 position 68851629, Chr15 position 70667596, Chr15 position 70767206, Chr15 position 75251486, Chr15 position 77984014, Chr15 position 77989064, Chr15 position 83952081, Chr15 position 85402496, Chr15 position 85402497, Chr15 position 99417337, Chromosome 16 (Chr16) position 1231873, Chr16 position 1458639, Chr16 position 3023231, Chr16 position 23135832, Chr16 position 29616265, Chr16 position 31009547, Chr16 position 31009548, Chr16 position 31009590, Chr16 position 57793674, Chr16 position 57793715, Chr16 position 57793727, Chr16 position 70771056, Chr16 position 70771079, Chr16 position 70771141, Chr16 position 77332010, Chr16 position 78540378, Chr16 position 79333435, Chr16 position 84262419, Chr16 position 88701114, Chr16 position 89988308, Chr16 position 89988644, Chromosome 17 (Chr17) position 1509928, Chr17 position 1509945, Chr17 position 1509952, Chr17 position 1509953, Chr17 position 7644013, Chr17 position 16323460, Chr17 position 16323473, Chr17 position 16924561, Chr17 position 16924562, Chr17 position 16924594, Chr17 position 17717918, Chr17 position 17718591, Chr17 position 18139506, Chr17 position 35278031, Chr17 position 39677570, Chr17 position 40826257, Chr17 position 43037426, Chr17 position 43200096, Chr17 position 43200239, Chr17 position 43510142, Chr17 position 47987828, Chr17 position 48178379, Chr17 position 48596391, Chr17 position 48764165, Chr17 position 55701962, Chr17 position 73584599, Chr17 position 73993165, Chr17 position 75827716, Chr17 position 76882243, Chr17 position 78765910, Chr17 position 79544478, Chr17 position 80696474, Chromosome 18 (Chr18) position 19751759, Chr18 position 21440760, Chr18 position 45555437, Chr18 position 45555438, Chr18 position 46547891, Chr18 position 55888885, Chr18 position 56452096, Chr18 position 56452476, Chr18 position 56887181, Chr18 position 76002973, Chr18 position 77331090, Chromosome 19 (Chr19) position 677895, Chr19 position 884044, Chr19 position 884059, Chr19 position 884105, Chr19 position 884115, Chr19 position 1136511, Chr19 position 1177605, Chr19 position 1177612, Chr19 position 1177640, Chr19 position 1860601, Chr19 position 1860607, Chr19 position 2503954, Chr19 position 3434917, Chr19 position 3434921, Chr19 position 3434930, Chr19 position 3434939, Chr19 position 3434952, Chr19 position 3434954, Chr19 position 3434962, Chr19 position 3434964, Chr19 position 3434979, Chr19 position 3434985, Chr19 position 4052713, Chr19 position 4052714, Chr19 position 4052749, Chr19 position 4374591, Chr19 position 5013982, Chr19 position 5048836, Chr19 position 5048867, Chr19 position 5048877, Chr19 position 8367279, Chr19 position 8428573, Chr19 position 10254577, Chr19 position 10254578, Chr19 position 10463956, Chr19 position 10464137, Chr19 position 13203671, Chr19 position 13266925, Chr19 position 13266934, Chr19 position 13266970, Chr19 position 13842142, Chr19 position 14248494, Chr19 position 15375465, Chr19 position 17218912, Chr19 position 17346702, Chr19 position 17346702, Chr19 position 18157161, Chr19 position 18157221, Chr19 position 18157258, Chr19 position 18415877, Chr19 position 18415890, Chr19 position 30606642, Chr19 position 35531842, Chr19 position 44303112, Chr19 position 47173037, Chr19 position 47316268, Chr19 position 47778278, Chr19 position 47778298, Chromosome 20 (Chr20) position 34206950, Chr20 position 36771969, Chr20 position 48993661, Chr20 position 58406398, Chr20 position 61976049, Chr20 position 61976073, Chr20 position 62588571, Chr20 position 62588579, Chromosome 22 (Chr22) position 19738127, Chr22 position 35965176, Chr22 position 36549809, Chr22 position 36973375, Chr22 position 37447953, Chr22 position 37914998, Chr22 position 38307317, Chr22 position 39662794, and Chr22 position 45622980.

[0061] In embodiments, the method includes detecting methylation or unmethylation of at least 1 of the following sites: Chr1 position 2996653, Chr1 position 11979164, Chr1 position 12655938, Chr1 position 16450525, Chr1 position 16450542, Chr1 position 16450545, Chr1 position 16469987, Chr1 position 17494491, Chr1 position 25473203, Chr1 position 27640460, Chr1 position 29565080, Chr1 position 38493013, Chr1 position 38493030, Chr1 position 38493074, Chr1 position 46713777, Chr1 position 46914121, Chr1 position 46955744, Chr1 position 55008344, Chr1 position 109816092, Chr1 position 109816111, Chr1 position 110074669, Chr1 position 110074681, Chr1 position 110074685, Chr1 position 150949856, Chr1 position 150949857, Chr1 position 153540282, Chr1 position 155162704, Chr1 position 155162714, Chr1 position 156676611, Chr1 position 157611881, Chr1 position 182205324, Chr1 position 204118999, Chr1 position 206741875, Chr1 position 206741989, Chr1 position 212587673, Chr1 position 212841198, Chr1 position 223403952, Chr1 position 233430972, Chr1 position 234342767, Chr2 position 3454277, Chr2 position 8793724, Chr2 position 20412441, Chr2 position 42329402, Chr2 position 42329494, Chr2 position 55289272, Chr2 position 65064865, Chr2 position 70823641, Chr2 position 73143689, Chr2 position 74454110, Chr2 position 122014529, Chr2 position 128158884, Chr2 position 128158910, Chr2 position 203114171, Chr2 position 218221671, Chr2 position 219745335, Chr2 position 238341465, Chr2 position 238341542, Chr2 position 238341546, Chr2 position 238774763, Chr3 position 13323642, Chr3 position 14180153, Chr3 position 45209073, Chr3 position 45209207, Chr3 position 52525100, Chr3 position 62589658, Chr3 position 65388317, Chr3 position 65388388, Chr3 position 73599302, Chr3 position 195636893, Chr3 position 197093846, Chr4 position 3743223, Chr4 position 5755716, Chr4 position 5755717, Chr4 position 5755728, Chr4 position 5755729, Chr4 position 5755734, Chr4 position 8372861, Chr4 position 57548289, Chr5 position 1118280, Chr5 position 34564389, Chr5 position 73871907, Chr5 position 78013596, Chr5 position 78013643, Chr5 position 137802650, Chr5 position 139051189, Chr5 position 167838221, Chr5 position 177541401, Chr5 position 180018672, Chr5 position 180101026, Chr6 position 3394325, Chr6 position 3887581, Chr6 position 7236568, Chr6 position 7728692, Chr6 position 34203617, Chr6 position 37751320, Chr6 position 41410682, Chr6 position 41438516, Chr6 position 41438575, Chr6 position 43464150, Chr6 position 158734279, Chr7 position 989235, Chr7 position 2673543, Chr7 position 73508602, Chr7 position 105079565, Chr7 position 105079631, Chr7 position 151425103, Chr7 position 151425104, Chr8 position 11764017, Chr8 position 21647308, Chr8 position 22548399, Chr8 position 22548483, Chr8 position 133570537, Chr8 position 141320393, Chr8 position 141320410, Chr9 position 6566568, Chr9 position 16197862, Chr9 position 34591313, Chr9 position 98225096, Chr9 position 126126741, Chr9 position 132083428, Chr9 position 136077410, Chr9 position 139655018, Chr9 position 140205985, Chr9 position 140205985, Chr9 position 140205997, Chr10 position 3929071, Chr10 position 30047012, Chr10 position 79702989, Chr10 position 87984905, Chr10 position 94838789, Chr10 position 102131187, Chr10 position 104196489, Chr10 position 111766879, Chr10 position 112258886, Chr10 position 112258984, Chr10 position 112259015, Chr10 position 116391763, Chr10 position 120011530, Chr10 position 126172714, Chr10 position 126172747, Chr11 position 556355, Chr11 position 821282, Chr11 position 12188937, Chr11 position 12188948, Chr11 position 12188995, Chr11 position 36057726, Chr11 position 48070143, Chr11 position 48070163, Chr11 position 48070166, Chr11 position 48070174, Chr11 position 65158294, Chr11 position 65158342, Chr11 position 65297089, Chr11 position 66104481, Chr11 position 66104485, Chr11 position 66104578, Chr11 position 68608767, Chr11 position 70236292, Chr11 position 70236320, Chr11 position 70236331, Chr1l position 115530032, Chr1l position 117950310, Chr1l position 117950329, Chr1l position 117950361, Chr1l position 117950362, Chr1l position 119293593, Chr12 position 679803, Chr12 position 26039132, Chr12 position 31004558, Chr12 position 45610695, Chr12 position 45610701, Chr12 position 45610702, Chr12 position 45610706, Chr12 position 50286016, Chr12 position 52243258, Chr12 position 52243286, Chr12 position 54145732, Chr12 position 54145741, Chr12 position 54145825, Chr12 position 56115043, Chr12 position 66262229, Chr12 position 66262230, Chr12 position 66262233, Chr12 position 66262234, Chr12 position 77266621, Chr12 position 117580102, Chr12 position 123435962, Chr12 position 123436011, Chr12 position 123436065, Chr12 position 123540893, Chr13 position 20735797, Chr13 position 23500419, Chr13 position 46771519, Chr13 position 46771520, Chr13 position 53313426, Chr13 position 113807393, Chr14 position 38599118, Chr14 position 69170010, Chr14 position 75701632, Chr14 position 75701643, Chr14 position 90850454, Chr14 position 97524282, Chr14 position 103541602, Chr14 position 103768055, Chr14 position 104209000, Chr14 position 104209068, Chr14 position 104354645, Chr14 position 104360487, Chr15 position 41068807, Chr15 position 61152225, Chr15 position 61152253, Chr15 position 61152313, Chr15 position 65186440, Chr15 position 68851629, Chr15 position 70667596, Chr15 position 70767206, Chr15 position 75251486, Chr15 position 77984014, Chr15 position 77989064, Chr15 position 83952081, Chr15 position 85402496, Chr15 position 85402497, Chr15 position 99417337, Chr16 position 1231873, Chr16 position 1458639, Chr16 position 3023231, Chr16 position 23135832, Chr16 position 29616265, Chr16 position 31009547, Chr16 position 31009548, Chr16 position 31009590, Chr16 position 57793674, Chr16 position 57793715, Chr16 position 57793727, Chr16 position 70771056, Chr16 position 70771079, Chr16 position 70771141, Chr16 position 77332010, Chr16 position 78540378, Chr16 position 79333435, Chr16 position 84262419, Chr16 position 88701114, Chr16 position 89988308, Chr16 position 89988644, Chr17 position 1509928, Chr17 position 1509945, Chr17 position 1509952, Chr17 position 1509953, Chr17 position 7644013, Chr17 position 16323460, Chr17 position 16323473, Chr17 position 16924561, Chr17 position 16924562, Chr17 position 16924594, Chr17 position 17717918, Chr17 position 17718591, Chr17 position 18139506, Chr17 position 35278031, Chr17 position 39677570, Chr17 position 40826257, Chr17 position 43037426, Chr17 position 43200096, Chr17 position 43200239, Chr17 position 43510142, Chr17 position 47987828, Chr17 position 48178379, Chr17 position 48596391, Chr17 position 48764165, Chr17 position 55701962, Chr17 position 73584599, Chr17 position 73993165, Chr17 position 75827716, Chr17 position 76882243, Chr17 position 78765910, Chr17 position 79544478, Chr17 position 80696474, Chr18 position 19751759, Chr18 position 21440760, Chr18 position 45555437, Chr18 position 45555438, Chr18 position 46547891, Chr18 position 55888885, Chr18 position 56452096, Chr18 position 56452476, Chr18 position 56887181, Chr18 position 76002973, Chr18 position 77331090, Chr19 position 677895, Chr19 position 884044, Chr19 position 884059, Chr19 position 884105, Chr19 position 884115, Chr19 position 1136511, Chr19 position 1177605, Chr19 position 1177612, Chr19 position 1177640, Chr19 position 1860601, Chr19 position 1860607, Chr19 position 2503954, Chr19 position 3434917, Chr19 position 3434921, Chr19 position 3434930, Chr19 position 3434939, Chr19 position 3434952, Chr19 position 3434954, Chr19 position 3434962, Chr19 position 3434964, Chr19 position 3434979, Chr19 position 3434985, Chr19 position 4052713, Chr19 position 4052714, Chr19 position 4052749, Chr19 position 4374591, Chr19 position 5013982, Chr19 position 5048836, Chr19 position 5048867, Chr19 position 5048877, Chr19 position 8367279, Chr19 position 8428573, Chr19 position 10254577, Chr19 position 10254578, Chr19 position 10463956, Chr19 position 10464137, Chr19 position 13203671, Chr19 position 13266925, Chr19 position 13266934, Chr19 position 13266970, Chr19 position 13842142, Chr19 position 14248494, Chr19 position 15375465, Chr19 position 17218912, Chr19 position 17346702, Chr19 position 17346702, Chr19 position 18157161, Chr19 position 18157221, Chr19 position 18157258, Chr19 position 18415877, Chr19 position 18415890, Chr19 position 30606642, Chr19 position 35531842, Chr19 position 44303112, Chr19 position 47173037, Chr19 position 47316268, Chr19 position 47778278, Chr19 position 47778298, Chr20 position 34206950, Chr20 position 36771969, Chr20 position 48993661, Chr20 position 58406398, Chr20 position 61976049, Chr20 position 61976073, Chr20 position 62588571, Chr20 position 62588579, Chr22 position 19738127, Chr22 position 35965176, Chr22 position 36549809, Chr22 position 36973375, Chr22 position 37447953, Chr22 position 37914998, Chr22 position 38307317, Chr22 position 39662794, and Chr22 position 45622980.

[0062] In embodiments, the method includes detecting methylation or unmethylation of at least 2 of the following sites: Chr1 position 2996653, Chr1 position 11979164, Chr1 position 12655938, Chr1 position 16450525, Chr1 position 16450542, Chr1 position 16450545, Chr1 position 16469987, Chr1 position 17494491, Chr1 position 25473203, Chr1 position 27640460, Chr1 position 29565080, Chr1 position 38493013, Chr1 position 38493030, Chr1 position 38493074, Chr1 position 46713777, Chr1 position 46914121, Chr1 position 46955744, Chr1 position 55008344, Chr1 position 109816092, Chr1 position 109816111, Chr1 position 110074669, Chr1 position 110074681, Chr1 position 110074685, Chr1 position 150949856, Chr1 position 150949857, Chr1 position 153540282, Chr1 position 155162704, Chr1 position 155162714, Chr1 position 156676611, Chr1 position 157611881, Chr1 position 182205324, Chr1 position 204118999, Chr1 position 206741875, Chr1 position 206741989, Chr1 position 212587673, Chr1 position 212841198, Chr1 position 223403952, Chr1 position 233430972, Chr1 position 234342767, Chr2 position 3454277, Chr2 position 8793724, Chr2 position 20412441, Chr2 position 42329402, Chr2 position 42329494, Chr2 position 55289272, Chr2 position 65064865, Chr2 position 70823641, Chr2 position 73143689, Chr2 position 74454110, Chr2 position 122014529, Chr2 position 128158884, Chr2 position 128158910, Chr2 position 203114171, Chr2 position 218221671, Chr2 position 219745335, Chr2 position 238341465, Chr2 position 238341542, Chr2 position 238341546, Chr2 position 238774763, Chr3 position 13323642, Chr3 position 14180153, Chr3 position 45209073, Chr3 position 45209207, Chr3 position 52525100, Chr3 position 62589658, Chr3 position 65388317, Chr3 position 65388388, Chr3 position 73599302, Chr3 position 195636893, Chr3 position 197093846, Chr4 position 3743223, Chr4 position 5755716, Chr4 position 5755717, Chr4 position 5755728, Chr4 position 5755729, Chr4 position 5755734, Chr4 position 8372861, Chr4 position 57548289, Chr5 position 1118280, Chr5 position 34564389, Chr5 position 73871907, Chr5 position 78013596, Chr5 position 78013643, Chr5 position 137802650, Chr5 position 139051189, Chr5 position 167838221, Chr5 position 177541401, Chr5 position 180018672, Chr5 position 180101026, Chr6 position 3394325, Chr6 position 3887581, Chr6 position 7236568, Chr6 position 7728692, Chr6 position 34203617, Chr6 position 37751320, Chr6 position 41410682, Chr6 position 41438516, Chr6 position 41438575, Chr6 position 43464150, Chr6 position 158734279, Chr7 position 989235, Chr7 position 2673543, Chr7 position 73508602, Chr7 position 105079565, Chr7 position 105079631, Chr7 position 151425103, Chr7 position 151425104, Chr8 position 11764017, Chr8 position 21647308, Chr8 position 22548399, Chr8 position 22548483, Chr8 position 133570537, Chr8 position 141320393, Chr8 position 141320410, Chr9 position 6566568, Chr9 position 16197862, Chr9 position 34591313, Chr9 position 98225096, Chr9 position 126126741, Chr9 position 132083428, Chr9 position 136077410, Chr9 position 139655018, Chr9 position 140205985, Chr9 position 140205985, Chr9 position 140205997, Chr10 position 3929071, Chr10 position 30047012, Chr10 position 79702989, Chr10 position 87984905, Chr10 position 94838789, Chr10 position 102131187, Chr10 position 104196489, Chr10 position 111766879, Chr10 position 112258886, Chr10 position 112258984, Chr10 position 112259015, Chr10 position 116391763, Chr10 position 120011530, Chr10 position 126172714, Chr10 position 126172747, Chr11 position 556355, Chr11 position 821282, Chr11 position 12188937, Chr11 position 12188948, Chr11 position 12188995, Chr11 position 36057726, Chr11 position 48070143, Chr11 position 48070163, Chr11 position 48070166, Chr11 position 48070174, Chr11 position 65158294, Chr11 position 65158342, Chr11 position 65297089, Chr11 position 66104481, Chr11 position 66104485, Chr11 position 66104578, Chr11 position 68608767, Chr11 position 70236292, Chr11 position 70236320, Chr11 position 70236331, Chr1l position 115530032, Chr1l position 117950310, Chr1l position 117950329, Chr1l position 117950361, Chr1l position 117950362, Chr1l position 119293593, Chr12 position 679803, Chr12 position 26039132, Chr12 position 31004558, Chr12 position 45610695, Chr12 position 45610701, Chr12 position 45610702, Chr12 position 45610706, Chr12 position 50286016, Chr12 position 52243258, Chr12 position 52243286, Chr12 position 54145732, Chr12 position 54145741, Chr12 position 54145825, Chr12 position 56115043, Chr12 position 66262229, Chr12 position 66262230, Chr12 position 66262233, Chr12 position 66262234, Chr12 position 77266621, Chr12 position 117580102, Chr12 position 123435962, Chr12 position 123436011, Chr12 position 123436065, Chr12 position 123540893, Chr13 position 20735797, Chr13 position 23500419, Chr13 position 46771519, Chr13 position 46771520, Chr13 position 53313426, Chr13 position 113807393, Chr14 position 38599118, Chr14 position 69170010, Chr14 position 75701632, Chr14 position 75701643, Chr14 position 90850454, Chr14 position 97524282, Chr14 position 103541602, Chr14 position 103768055, Chr14 position 104209000, Chr14 position 104209068, Chr14 position 104354645, Chr14 position 104360487, Chr15 position 41068807, Chr15 position 61152225, Chr15 position 61152253, Chr15 position 61152313, Chr15 position 65186440, Chr15 position 68851629, Chr15 position 70667596, Chr15 position 70767206, Chr15 position 75251486, Chr15 position 77984014, Chr15 position 77989064, Chr15 position 83952081, Chr15 position 85402496, Chr15 position 85402497, Chr15 position 99417337, Chr16 position 1231873, Chr16 position 1458639, Chr16 position 3023231, Chr16 position 23135832, Chr16 position 29616265, Chr16 position 31009547, Chr16 position 31009548, Chr16 position 31009590, Chr16 position 57793674, Chr16 position 57793715, Chr16 position 57793727, Chr16 position 70771056, Chr16 position 70771079, Chr16 position 70771141, Chr16 position 77332010, Chr16 position 78540378, Chr16 position 79333435, Chr16 position 84262419, Chr16 position 88701114, Chr16 position 89988308, Chr16 position 89988644, Chr17 position 1509928, Chr17 position 1509945, Chr17 position 1509952, Chr17 position 1509953, Chr17 position 7644013, Chr17 position 16323460, Chr17 position 16323473, Chr17 position 16924561, Chr17 position 16924562, Chr17 position 16924594, Chr17 position 17717918, Chr17 position 17718591, Chr17 position 18139506, Chr17 position 35278031, Chr17 position 39677570, Chr17 position 40826257, Chr17 position 43037426, Chr17 position 43200096, Chr17 position 43200239, Chr17 position 43510142, Chr17 position 47987828, Chr17 position 48178379, Chr17 position 48596391, Chr17 position 48764165, Chr17 position 55701962, Chr17 position 73584599, Chr17 position 73993165, Chr17 position 75827716, Chr17 position 76882243, Chr17 position 78765910, Chr17 position 79544478, Chr17 position 80696474, Chr18 position 19751759, Chr18 position 21440760, Chr18 position 45555437, Chr18 position 45555438, Chr18 position 46547891, Chr18 position 55888885, Chr18 position 56452096, Chr18 position 56452476, Chr18 position 56887181, Chr18 position 76002973, Chr18 position 77331090, Chr19 position 677895, Chr19 position 884044, Chr19 position 884059, Chr19 position 884105, Chr19 position 884115, Chr19 position 1136511, Chr19 position 1177605, Chr19 position 1177612, Chr19 position 1177640, Chr19 position 1860601, Chr19 position 1860607, Chr19 position 2503954, Chr19 position 3434917, Chr19 position 3434921, Chr19 position 3434930, Chr19 position 3434939, Chr19 position 3434952, Chr19 position 3434954, Chr19 position 3434962, Chr19 position 3434964, Chr19 position 3434979, Chr19 position 3434985, Chr19 position 4052713, Chr19 position 4052714, Chr19 position 4052749, Chr19 position 4374591, Chr19 position 5013982, Chr19 position 5048836, Chr19 position 5048867, Chr19 position 5048877, Chr19 position 8367279, Chr19 position 8428573, Chr19 position 10254577, Chr19 position 10254578, Chr19 position 10463956, Chr19 position 10464137, Chr19 position 13203671, Chr19 position 13266925, Chr19 position 13266934, Chr19 position 13266970, Chr19 position 13842142, Chr19 position 14248494, Chr19 position 15375465, Chr19 position 17218912, Chr19 position 17346702, Chr19 position 17346702, Chr19 position 18157161, Chr19 position 18157221, Chr19 position 18157258, Chr19 position 18415877, Chr19 position 18415890, Chr19 position 30606642, Chr19 position 35531842, Chr19 position 44303112, Chr19 position 47173037, Chr19 position 47316268, Chr19 position 47778278, Chr19 position 47778298, Chr20 position 34206950, Chr20 position 36771969, Chr20 position 48993661, Chr20 position 58406398, Chr20 position 61976049, Chr20 position 61976073, Chr20 position 62588571, Chr20 position 62588579, Chr22 position 19738127, Chr22 position 35965176, Chr22 position 36549809, Chr22 position 36973375, Chr22 position 37447953, Chr22 position 37914998, Chr22 position 38307317, Chr22 position 39662794, and Chr22 position 45622980.

[0063] In embodiments, the method includes detecting methylation or unmethylation of at least 3 of the following sites: Chr1 position 2996653, Chr1 position 11979164, Chr1 position 12655938, Chr1 position 16450525, Chr1 position 16450542, Chr1 position 16450545, Chr1 position 16469987, Chr1 position 17494491, Chr1 position 25473203, Chr1 position 27640460, Chr1 position 29565080, Chr1 position 38493013, Chr1 position 38493030, Chr1 position 38493074, Chr1 position 46713777, Chr1 position 46914121, Chr1 position 46955744, Chr1 position 55008344, Chr1 position 109816092, Chr1 position 109816111, Chr1 position 110074669, Chr1 position 110074681, Chr1 position 110074685, Chr1 position 150949856, Chr1 position 150949857, Chr1 position 153540282, Chr1 position 155162704, Chr1 position 155162714, Chr1 position 156676611, Chr1 position 157611881, Chr1 position 182205324, Chr1 position 204118999, Chr1 position 206741875, Chr1 position 206741989, Chr1 position 212587673, Chr1 position 212841198, Chr1 position 223403952, Chr1 position 233430972, Chr1 position 234342767, Chr2 position 3454277, Chr2 position 8793724, Chr2 position 20412441, Chr2 position 42329402, Chr2 position 42329494, Chr2 position 55289272, Chr2 position 65064865, Chr2 position 70823641, Chr2 position 73143689, Chr2 position 74454110, Chr2 position 122014529, Chr2 position 128158884, Chr2 position 128158910, Chr2 position 203114171, Chr2 position 218221671, Chr2 position 219745335, Chr2 position 238341465, Chr2 position 238341542, Chr2 position 238341546, Chr2 position 238774763, Chr3 position 13323642, Chr3 position 14180153, Chr3 position 45209073, Chr3 position 45209207, Chr3 position 52525100, Chr3 position 62589658, Chr3 position 65388317, Chr3 position 65388388, Chr3 position 73599302, Chr3 position 195636893, Chr3 position 197093846, Chr4 position 3743223, Chr4 position 5755716, Chr4 position 5755717, Chr4 position 5755728, Chr4 position 5755729, Chr4 position 5755734, Chr4 position 8372861, Chr4 position 57548289, Chr5 position 1118280, Chr5 position 34564389, Chr5 position 73871907, Chr5 position 78013596, Chr5 position 78013643, Chr5 position 137802650, Chr5 position 139051189, Chr5 position 167838221, Chr5 position 177541401, Chr5 position 180018672, Chr5 position 180101026, Chr6 position 3394325, Chr6 position 3887581, Chr6 position 7236568, Chr6 position 7728692, Chr6 position 34203617, Chr6 position 37751320, Chr6 position 41410682, Chr6 position 41438516, Chr6 position 41438575, Chr6 position 43464150, Chr6 position 158734279, Chr7 position 989235, Chr7 position 2673543, Chr7 position 73508602, Chr7 position 105079565, Chr7 position 105079631, Chr7 position 151425103, Chr7 position 151425104, Chr8 position 11764017, Chr8 position 21647308, Chr8 position 22548399, Chr8 position 22548483, Chr8 position 133570537, Chr8 position 141320393, Chr8 position 141320410, Chr9 position 6566568, Chr9 position 16197862, Chr9 position 34591313, Chr9 position 98225096, Chr9 position 126126741, Chr9 position 132083428, Chr9 position 136077410, Chr9 position 139655018, Chr9 position 140205985, Chr9 position 140205985, Chr9 position 140205997, Chr10 position 3929071, Chr10 position 30047012, Chr10 position 79702989, Chr10 position 87984905, Chr10 position 94838789, Chr10 position 102131187, Chr10 position 104196489, Chr10 position 111766879, Chr10 position 112258886, Chr10 position 112258984, Chr10 position 112259015, Chr10 position 116391763, Chr10 position 120011530, Chr10 position 126172714, Chr10 position 126172747, Chr11 position 556355, Chr11 position 821282, Chr11 position 12188937, Chr11 position 12188948, Chr11 position 12188995, Chr11 position 36057726, Chr11 position 48070143, Chr11 position 48070163, Chr11 position 48070166, Chr11 position 48070174, Chr11 position 65158294, Chr11 position 65158342, Chr11 position 65297089, Chr11 position 66104481, Chr11 position 66104485, Chr11 position 66104578, Chr11 position 68608767, Chr11 position 70236292, Chr11 position 70236320, Chr11 position 70236331, Chr1l position 115530032, Chr1l position 117950310, Chr1l position 117950329, Chr1l position 117950361, Chr1l position 117950362, Chr1l position 119293593, Chr12 position 679803, Chr12 position 26039132, Chr12 position 31004558, Chr12 position 45610695, Chr12 position 45610701, Chr12 position 45610702, Chr12 position 45610706, Chr12 position 50286016, Chr12 position 52243258, Chr12 position 52243286, Chr12 position 54145732, Chr12 position 54145741, Chr12 position 54145825, Chr12 position 56115043, Chr12 position 66262229, Chr12 position 66262230, Chr12 position 66262233, Chr12 position 66262234, Chr12 position 77266621, Chr12 position 117580102, Chr12 position 123435962, Chr12 position 123436011, Chr12 position 123436065, Chr12 position 123540893, Chr13 position 20735797, Chr13 position 23500419, Chr13 position 46771519, Chr13 position 46771520, Chr13 position 53313426, Chr13 position 113807393, Chr14 position 38599118, Chr14 position 69170010, Chr14 position 75701632, Chr14 position 75701643, Chr14 position 90850454, Chr14 position 97524282, Chr14 position 103541602, Chr14 position 103768055, Chr14 position 104209000, Chr14 position 104209068, Chr14 position 104354645, Chr14 position 104360487, Chr15 position 41068807, Chr15 position 61152225, Chr15 position 61152253, Chr15 position 61152313, Chr15 position 65186440, Chr15 position 68851629, Chr15 position 70667596, Chr15 position 70767206, Chr15 position 75251486, Chr15 position 77984014, Chr15 position 77989064, Chr15 position 83952081, Chr15 position 85402496, Chr15 position 85402497, Chr15 position 99417337, Chr16 position 1231873, Chr16 position 1458639, Chr16 position 3023231, Chr16 position 23135832, Chr16 position 29616265, Chr16 position 31009547, Chr16 position 31009548, Chr16 position 31009590, Chr16 position 57793674, Chr16 position 57793715, Chr16 position 57793727, Chr16 position 70771056, Chr16 position 70771079, Chr16 position 70771141, Chr16 position 77332010, Chr16 position 78540378, Chr16 position 79333435, Chr16 position 84262419, Chr16 position 88701114, Chr16 position 89988308, Chr16 position 89988644, Chr17 position 1509928, Chr17 position 1509945, Chr17 position 1509952, Chr17 position 1509953, Chr17 position 7644013, Chr17 position 16323460, Chr17 position 16323473, Chr17 position 16924561, Chr17 position 16924562, Chr17 position 16924594, Chr17 position 17717918, Chr17 position 17718591, Chr17 position 18139506, Chr17 position 35278031, Chr17 position 39677570, Chr17 position 40826257, Chr17 position 43037426, Chr17 position 43200096, Chr17 position 43200239, Chr17 position 43510142, Chr17 position 47987828, Chr17 position 48178379, Chr17 position 48596391, Chr17 position 48764165, Chr17 position 55701962, Chr17 position 73584599, Chr17 position 73993165, Chr17 position 75827716, Chr17 position 76882243, Chr17 position 78765910, Chr17 position 79544478, Chr17 position 80696474, Chr18 position 19751759, Chr18 position 21440760, Chr18 position 45555437, Chr18 position 45555438, Chr18 position 46547891, Chr18 position 55888885, Chr18 position 56452096, Chr18 position 56452476, Chr18 position 56887181, Chr18 position 76002973, Chr18 position 77331090, Chr19 position 677895, Chr19 position 884044, Chr19 position 884059, Chr19 position 884105, Chr19 position 884115, Chr19 position 1136511, Chr19 position 1177605, Chr19 position 1177612, Chr19 position 1177640, Chr19 position 1860601, Chr19 position 1860607, Chr19 position 2503954, Chr19 position 3434917, Chr19 position 3434921, Chr19 position 3434930, Chr19 position 3434939, Chr19 position 3434952, Chr19 position 3434954, Chr19 position 3434962, Chr19 position 3434964, Chr19 position 3434979, Chr19 position 3434985, Chr19 position 4052713, Chr19 position 4052714, Chr19 position 4052749, Chr19 position 4374591, Chr19 position 5013982, Chr19 position 5048836, Chr19 position 5048867, Chr19 position 5048877, Chr19 position 8367279, Chr19 position 8428573, Chr19 position 10254577, Chr19 position 10254578, Chr19 position 10463956, Chr19 position 10464137, Chr19 position 13203671, Chr19 position 13266925, Chr19 position 13266934, Chr19 position 13266970, Chr19 position 13842142, Chr19 position 14248494, Chr19 position 15375465, Chr19 position 17218912, Chr19 position 17346702, Chr19 position 17346702, Chr19 position 18157161, Chr19 position 18157221, Chr19 position 18157258, Chr19 position 18415877, Chr19 position 18415890, Chr19 position 30606642, Chr19 position 35531842, Chr19 position 44303112, Chr19 position 47173037, Chr19 position 47316268, Chr19 position 47778278, Chr19 position 47778298, Chr20 position 34206950, Chr20 position 36771969, Chr20 position 48993661, Chr20 position 58406398, Chr20 position 61976049, Chr20 position 61976073, Chr20 position 62588571, Chr20 position 62588579, Chr22 position 19738127, Chr22 position 35965176, Chr22 position 36549809, Chr22 position 36973375, Chr22 position 37447953, Chr22 position 37914998, Chr22 position 38307317, Chr22 position 39662794, and Chr22 position 45622980.

[0064] In embodiments, the method includes detecting methylation or unmethylation of at least 4 of the following sites: Chr1 position 2996653, Chr1 position 11979164, Chr1 position 12655938, Chr1 position 16450525, Chr1 position 16450542, Chr1 position 16450545, Chr1 position 16469987, Chr1 position 17494491, Chr1 position 25473203, Chr1 position 27640460, Chr1 position 29565080, Chr1 position 38493013, Chr1 position 38493030, Chr1 position 38493074, Chr1 position 46713777, Chr1 position 46914121, Chr1 position 46955744, Chr1 position 55008344, Chr1 position 109816092, Chr1 position 109816111, Chr1 position 110074669, Chr1 position 110074681, Chr1 position 110074685, Chr1 position 150949856, Chr1 position 150949857, Chr1 position 153540282, Chr1 position 155162704, Chr1 position 155162714, Chr1 position 156676611, Chr1 position 157611881, Chr1 position 182205324, Chr1 position 204118999, Chr1 position 206741875, Chr1 position 206741989, Chr1 position 212587673, Chr1 position 212841198, Chr1 position 223403952, Chr1 position 233430972, Chr1 position 234342767, Chr2 position 3454277, Chr2 position 8793724, Chr2 position 20412441, Chr2 position 42329402, Chr2 position 42329494, Chr2 position 55289272, Chr2 position 65064865, Chr2 position 70823641, Chr2 position 73143689, Chr2 position 74454110, Chr2 position 122014529, Chr2 position 128158884, Chr2 position 128158910, Chr2 position 203114171, Chr2 position 218221671, Chr2 position 219745335, Chr2 position 238341465, Chr2 position 238341542, Chr2 position 238341546, Chr2 position 238774763, Chr3 position 13323642, Chr3 position 14180153, Chr3 position 45209073, Chr3 position 45209207, Chr3 position 52525100, Chr3 position 62589658, Chr3 position 65388317, Chr3 position 65388388, Chr3 position 73599302, Chr3 position 195636893, Chr3 position 197093846, Chr4 position 3743223, Chr4 position 5755716, Chr4 position 5755717, Chr4 position 5755728, Chr4 position 5755729, Chr4 position 5755734, Chr4 position 8372861, Chr4 position 57548289, Chr5 position 1118280, Chr5 position 34564389, Chr5 position 73871907, Chr5 position 78013596, Chr5 position 78013643, Chr5 position 137802650, Chr5 position 139051189, Chr5 position 167838221, Chr5 position 177541401, Chr5 position 180018672, Chr5 position 180101026, Chr6 position 3394325, Chr6 position 3887581, Chr6 position 7236568, Chr6 position 7728692, Chr6 position 34203617, Chr6 position 37751320, Chr6 position 41410682, Chr6 position 41438516, Chr6 position 41438575, Chr6 position 43464150, Chr6 position 158734279, Chr7 position 989235, Chr7 position 2673543, Chr7 position 73508602, Chr7 position 105079565, Chr7 position 105079631, Chr7 position 151425103, Chr7 position 151425104, Chr8 position 11764017, Chr8 position 21647308, Chr8 position 22548399, Chr8 position 22548483, Chr8 position 133570537, Chr8 position 141320393, Chr8 position 141320410, Chr9 position 6566568, Chr9 position 16197862, Chr9 position 34591313, Chr9 position 98225096, Chr9 position 126126741, Chr9 position 132083428, Chr9 position 136077410, Chr9 position 139655018, Chr9 position 140205985, Chr9 position 140205985, Chr9 position 140205997, Chr10 position 3929071, Chr10 position 30047012, Chr10 position 79702989, Chr10 position 87984905, Chr10 position 94838789, Chr10 position 102131187, Chr10 position 104196489, Chr10 position 111766879, Chr10 position 112258886, Chr10 position 112258984, Chr10 position 112259015, Chr10 position 116391763, Chr10 position 120011530, Chr10 position 126172714, Chr10 position 126172747, Chr11 position 556355, Chr11 position 821282, Chr11 position 12188937, Chr11 position 12188948, Chr11 position 12188995, Chr11 position 36057726, Chr11 position 48070143, Chr11 position 48070163, Chr11 position 48070166, Chr11 position 48070174, Chr11 position 65158294, Chr11 position 65158342, Chr11 position 65297089, Chr11 position 66104481, Chr11 position 66104485, Chr11 position 66104578, Chr11 position 68608767, Chr11 position 70236292, Chr11 position 70236320, Chr11 position 70236331, Chr1l position 115530032, Chr1l position 117950310, Chr1l position 117950329, Chr1l position 117950361, Chr1l position 117950362, Chr1l position 119293593, Chr12 position 679803, Chr12 position 26039132, Chr12 position 31004558, Chr12 position 45610695, Chr12 position 45610701, Chr12 position 45610702, Chr12 position 45610706, Chr12 position 50286016, Chr12 position 52243258, Chr12 position 52243286, Chr12 position 54145732, Chr12 position 54145741, Chr12 position 54145825, Chr12 position 56115043, Chr12 position 66262229, Chr12 position 66262230, Chr12 position 66262233, Chr12 position 66262234, Chr12 position 77266621, Chr12 position 117580102, Chr12 position 123435962, Chr12 position 123436011, Chr12 position 123436065, Chr12 position 123540893, Chr13 position 20735797, Chr13 position 23500419, Chr13 position 46771519, Chr13 position 46771520, Chr13 position 53313426, Chr13 position 113807393, Chr14 position 38599118, Chr14 position 69170010, Chr14 position 75701632, Chr14 position 75701643, Chr14 position 90850454, Chr14 position 97524282, Chr14 position 103541602, Chr14 position 103768055, Chr14 position 104209000, Chr14 position 104209068, Chr14 position 104354645, Chr14 position 104360487, Chr15 position 41068807, Chr15 position 61152225, Chr15 position 61152253, Chr15 position 61152313, Chr15 position 65186440, Chr15 position 68851629, Chr15 position 70667596, Chr15 position 70767206, Chr15 position 75251486, Chr15 position 77984014, Chr15 position 77989064, Chr15 position 83952081, Chr15 position 85402496, Chr15 position 85402497, Chr15 position 99417337, Chr16 position 1231873, Chr16 position 1458639, Chr16 position 3023231, Chr16 position 23135832, Chr16 position 29616265, Chr16 position 31009547, Chr16 position 31009548, Chr16 position 31009590, Chr16 position 57793674, Chr16 position 57793715, Chr16 position 57793727, Chr16 position 70771056, Chr16 position 70771079, Chr16 position 70771141, Chr16 position 77332010, Chr16 position 78540378, Chr16 position 79333435, Chr16 position 84262419, Chr16 position 88701114, Chr16 position 89988308, Chr16 position 89988644, Chr17 position 1509928, Chr17 position 1509945, Chr17 position 1509952, Chr17 position 1509953, Chr17 position 7644013, Chr17 position 16323460, Chr17 position 16323473, Chr17 position 16924561, Chr17 position 16924562, Chr17 position 16924594, Chr17 position 17717918, Chr17 position 17718591, Chr17 position 18139506, Chr17 position 35278031, Chr17 position 39677570, Chr17 position 40826257, Chr17 position 43037426, Chr17 position 43200096, Chr17 position 43200239, Chr17 position 43510142, Chr17 position 47987828, Chr17 position 48178379, Chr17 position 48596391, Chr17 position 48764165, Chr17 position 55701962, Chr17 position 73584599, Chr17 position 73993165, Chr17 position 75827716, Chr17 position 76882243, Chr17 position 78765910, Chr17 position 79544478, Chr17 position 80696474, Chr18 position 19751759, Chr18 position 21440760, Chr18 position 45555437, Chr18 position 45555438, Chr18 position 46547891, Chr18 position 55888885, Chr18 position 56452096, Chr18 position 56452476, Chr18 position 56887181, Chr18 position 76002973, Chr18 position 77331090, Chr19 position 677895, Chr19 position 884044, Chr19 position 884059, Chr19 position 884105, Chr19 position 884115, Chr19 position 1136511, Chr19 position 1177605, Chr19 position 1177612, Chr19 position 1177640, Chr19 position 1860601, Chr19 position 1860607, Chr19 position 2503954, Chr19 position 3434917, Chr19 position 3434921, Chr19 position 3434930, Chr19 position 3434939, Chr19 position 3434952, Chr19 position 3434954, Chr19 position 3434962, Chr19 position 3434964, Chr19 position 3434979, Chr19 position 3434985, Chr19 position 4052713, Chr19 position 4052714, Chr19 position 4052749, Chr19 position 4374591, Chr19 position 5013982, Chr19 position 5048836, Chr19 position 5048867, Chr19 position 5048877, Chr19 position 8367279, Chr19 position 8428573, Chr19 position 10254577, Chr19 position 10254578, Chr19 position 10463956, Chr19 position 10464137, Chr19 position 13203671, Chr19 position 13266925, Chr19 position 13266934, Chr19 position 13266970, Chr19 position 13842142, Chr19 position 14248494, Chr19 position 15375465, Chr19 position 17218912, Chr19 position 17346702, Chr19 position 17346702, Chr19 position 18157161, Chr19 position 18157221, Chr19 position 18157258, Chr19 position 18415877, Chr19 position 18415890, Chr19 position 30606642, Chr19 position 35531842, Chr19 position 44303112, Chr19 position 47173037, Chr19 position 47316268, Chr19 position 47778278, Chr19 position 47778298, Chr20 position 34206950, Chr20 position 36771969, Chr20 position 48993661, Chr20 position 58406398, Chr20 position 61976049, Chr20 position 61976073, Chr20 position 62588571, Chr20 position 62588579, Chr22 position 19738127, Chr22 position 35965176, Chr22 position 36549809, Chr22 position 36973375, Chr22 position 37447953, Chr22 position 37914998, Chr22 position 38307317, Chr22 position 39662794, and Chr22 position 45622980.

[0065] In embodiments, the method includes detecting methylation or unmethylation of at least 5 of the following sites: Chr1 position 2996653, Chr1 position 11979164, Chr1 position 12655938, Chr1 position 16450525, Chr1 position 16450542, Chr1 position 16450545, Chr1 position 16469987, Chr1 position 17494491, Chr1 position 25473203, Chr1 position 27640460, Chr1 position 29565080, Chr1 position 38493013, Chr1 position 38493030, Chr1 position 38493074, Chr1 position 46713777, Chr1 position 46914121, Chr1 position 46955744, Chr1 position 55008344, Chr1 position 109816092, Chr1 position 109816111, Chr1 position 110074669, Chr1 position 110074681, Chr1 position 110074685, Chr1 position 150949856, Chr1 position 150949857, Chr1 position 153540282, Chr1 position 155162704, Chr1 position 155162714, Chr1 position 156676611, Chr1 position 157611881, Chr1 position 182205324, Chr1 position 204118999, Chr1 position 206741875, Chr1 position 206741989, Chr1 position 212587673, Chr1 position 212841198, Chr1 position 223403952, Chr1 position 233430972, Chr1 position 234342767, Chr2 position 3454277, Chr2 position 8793724, Chr2 position 20412441, Chr2 position 42329402, Chr2 position 42329494, Chr2 position 55289272, Chr2 position 65064865, Chr2 position 70823641, Chr2 position 73143689, Chr2 position 74454110, Chr2 position 122014529, Chr2 position 128158884, Chr2 position 128158910, Chr2 position 203114171, Chr2 position 218221671, Chr2 position 219745335, Chr2 position 238341465, Chr2 position 238341542, Chr2 position 238341546, Chr2 position 238774763, Chr3 position 13323642, Chr3 position 14180153, Chr3 position 45209073, Chr3 position 45209207, Chr3 position 52525100, Chr3 position 62589658, Chr3 position 65388317, Chr3 position 65388388, Chr3 position 73599302, Chr3 position 195636893, Chr3 position 197093846, Chr4 position 3743223, Chr4 position 5755716, Chr4 position 5755717, Chr4 position 5755728, Chr4 position 5755729, Chr4 position 5755734, Chr4 position 8372861, Chr4 position 57548289, Chr5 position 1118280, Chr5 position 34564389, Chr5 position 73871907, Chr5 position 78013596, Chr5 position 78013643, Chr5 position 137802650, Chr5 position 139051189, Chr5 position 167838221, Chr5 position 177541401, Chr5 position 180018672, Chr5 position 180101026, Chr6 position 3394325, Chr6 position 3887581, Chr6 position 7236568, Chr6 position 7728692, Chr6 position 34203617, Chr6 position 37751320, Chr6 position 41410682, Chr6 position 41438516, Chr6 position 41438575, Chr6 position 43464150, Chr6 position 158734279, Chr7 position 989235, Chr7 position 2673543, Chr7 position 73508602, Chr7 position 105079565, Chr7 position 105079631, Chr7 position 151425103, Chr7 position 151425104, Chr8 position 11764017, Chr8 position 21647308, Chr8 position 22548399, Chr8 position 22548483, Chr8 position 133570537, Chr8 position 141320393, Chr8 position 141320410, Chr9 position 6566568, Chr9 position 16197862, Chr9 position 34591313, Chr9 position 98225096, Chr9 position 126126741, Chr9 position 132083428, Chr9 position 136077410, Chr9 position 139655018, Chr9 position 140205985, Chr9 position 140205985, Chr9 position 140205997, Chr10 position 3929071, Chr10 position 30047012, Chr10 position 79702989, Chr10 position 87984905, Chr10 position 94838789, Chr10 position 102131187, Chr10 position 104196489, Chr10 position 111766879, Chr10 position 112258886, Chr10 position 112258984, Chr10 position 112259015, Chr10 position 116391763, Chr10 position 120011530, Chr10 position 126172714, Chr10 position 126172747, Chr11 position 556355, Chr11 position 821282, Chr11 position 12188937, Chr11 position 12188948, Chr11 position 12188995, Chr11 position 36057726, Chr11 position 48070143, Chr11 position 48070163, Chr11 position 48070166, Chr11 position 48070174, Chr11 position 65158294, Chr11 position 65158342, Chr11 position 65297089, Chr11 position 66104481, Chr11 position 66104485, Chr11 position 66104578, Chr11 position 68608767, Chr11 position 70236292, Chr11 position 70236320, Chr11 position 70236331, Chr1l position 115530032, Chr1l position 117950310, Chr1l position 117950329, Chr1l position 117950361, Chr1l position 117950362, Chr1l position 119293593, Chr12 position 679803, Chr12 position 26039132, Chr12 position 31004558, Chr12 position 45610695, Chr12 position 45610701, Chr12 position 45610702, Chr12 position 45610706, Chr12 position 50286016, Chr12 position 52243258, Chr12 position 52243286, Chr12 position 54145732, Chr12 position 54145741, Chr12 position 54145825, Chr12 position 56115043, Chr12 position 66262229, Chr12 position 66262230, Chr12 position 66262233, Chr12 position 66262234, Chr12 position 77266621, Chr12 position 117580102, Chr12 position 123435962, Chr12 position 123436011, Chr12 position 123436065, Chr12 position 123540893, Chr13 position 20735797, Chr13 position 23500419, Chr13 position 46771519, Chr13 position 46771520, Chr13 position 53313426, Chr13 position 113807393, Chr14 position 38599118, Chr14 position 69170010, Chr14 position 75701632, Chr14 position 75701643, Chr14 position 90850454, Chr14 position 97524282, Chr14 position 103541602, Chr14 position 103768055, Chr14 position 104209000, Chr14 position 104209068, Chr14 position 104354645, Chr14 position 104360487, Chr15 position 41068807, Chr15 position 61152225, Chr15 position 61152253, Chr15 position 61152313, Chr15 position 65186440, Chr15 position 68851629, Chr15 position 70667596, Chr15 position 70767206, Chr15 position 75251486, Chr15 position 77984014, Chr15 position 77989064, Chr15 position 83952081, Chr15 position 85402496, Chr15 position 85402497, Chr15 position 99417337, Chr16 position 1231873, Chr16 position 1458639, Chr16 position 3023231, Chr16 position 23135832, Chr16 position 29616265, Chr16 position 31009547, Chr16 position 31009548, Chr16 position 31009590, Chr16 position 57793674, Chr16 position 57793715, Chr16 position 57793727, Chr16 position 70771056, Chr16 position 70771079, Chr16 position 70771141, Chr16 position 77332010, Chr16 position 78540378, Chr16 position 79333435, Chr16 position 84262419, Chr16 position 88701114, Chr16 position 89988308, Chr16 position 89988644, Chr17 position 1509928, Chr17 position 1509945, Chr17 position 1509952, Chr17 position 1509953, Chr17 position 7644013, Chr17 position 16323460, Chr17 position 16323473, Chr17 position 16924561, Chr17 position 16924562, Chr17 position 16924594, Chr17 position 17717918, Chr17 position 17718591, Chr17 position 18139506, Chr17 position 35278031, Chr17 position 39677570, Chr17 position 40826257, Chr17 position 43037426, Chr17 position 43200096, Chr17 position 43200239, Chr17 position 43510142, Chr17 position 47987828, Chr17 position 48178379, Chr17 position 48596391, Chr17 position 48764165, Chr17 position 55701962, Chr17 position 73584599, Chr17 position 73993165, Chr17 position 75827716, Chr17 position 76882243, Chr17 position 78765910, Chr17 position 79544478, Chr17 position 80696474, Chr18 position 19751759, Chr18 position 21440760, Chr18 position 45555437, Chr18 position 45555438, Chr18 position 46547891, Chr18 position 55888885, Chr18 position 56452096, Chr18 position 56452476, Chr18 position 56887181, Chr18 position 76002973, Chr18 position 77331090, Chr19 position 677895, Chr19 position 884044, Chr19 position 884059, Chr19 position 884105, Chr19 position 884115, Chr19 position 1136511, Chr19 position 1177605, Chr19 position 1177612, Chr19 position 1177640, Chr19 position 1860601, Chr19 position 1860607, Chr19 position 2503954, Chr19 position 3434917, Chr19 position 3434921, Chr19 position 3434930, Chr19 position 3434939, Chr19 position 3434952, Chr19 position 3434954, Chr19 position 3434962, Chr19 position 3434964, Chr19 position 3434979, Chr19 position 3434985, Chr19 position 4052713, Chr19 position 4052714, Chr19 position 4052749, Chr19 position 4374591, Chr19 position 5013982, Chr19 position 5048836, Chr19 position 5048867, Chr19 position 5048877, Chr19 position 8367279, Chr19 position 8428573, Chr19 position 10254577, Chr19 position 10254578, Chr19 position 10463956, Chr19 position 10464137, Chr19 position 13203671, Chr19 position 13266925, Chr19 position 13266934, Chr19 position 13266970, Chr19 position 13842142, Chr19 position 14248494, Chr19 position 15375465, Chr19 position 17218912, Chr19 position 17346702, Chr19 position 17346702, Chr19 position 18157161, Chr19 position 18157221, Chr19 position 18157258, Chr19 position 18415877, Chr19 position 18415890, Chr19 position 30606642, Chr19 position 35531842, Chr19 position 44303112, Chr19 position 47173037, Chr19 position 47316268, Chr19 position 47778278, Chr19 position 47778298, Chr20 position 34206950, Chr20 position 36771969, Chr20 position 48993661, Chr20 position 58406398, Chr20 position 61976049, Chr20 position 61976073, Chr20 position 62588571, Chr20 position 62588579, Chr22 position 19738127, Chr22 position 35965176, Chr22 position 36549809, Chr22 position 36973375, Chr22 position 37447953, Chr22 position 37914998, Chr22 position 38307317, Chr22 position 39662794, and Chr22 position 45622980.

[0066] In embodiments, the method includes detecting methylation or unmethylation of at least 6 of the following sites: Chr1 position 2996653, Chr1 position 11979164, Chr1 position 12655938, Chr1 position 16450525, Chr1 position 16450542, Chr1 position 16450545, Chr1 position 16469987, Chr1 position 17494491, Chr1 position 25473203, Chr1 position 27640460, Chr1 position 29565080, Chr1 position 38493013, Chr1 position 38493030, Chr1 position 38493074, Chr1 position 46713777, Chr1 position 46914121, Chr1 position 46955744, Chr1 position 55008344, Chr1 position 109816092, Chr1 position 109816111, Chr1 position 110074669, Chr1 position 110074681, Chr1 position 110074685, Chr1 position 150949856, Chr1 position 150949857, Chr1 position 153540282, Chr1 position 155162704, Chr1 position 155162714, Chr1 position 156676611, Chr1 position 157611881, Chr1 position 182205324, Chr1 position 204118999, Chr1 position 206741875, Chr1 position 206741989, Chr1 position 212587673, Chr1 position 212841198, Chr1 position 223403952, Chr1 position 233430972, Chr1 position 234342767, Chr2 position 3454277, Chr2 position 8793724, Chr2 position 20412441, Chr2 position 42329402, Chr2 position 42329494, Chr2 position 55289272, Chr2 position 65064865, Chr2 position 70823641, Chr2 position 73143689, Chr2 position 74454110, Chr2 position 122014529, Chr2 position 128158884, Chr2 position 128158910, Chr2 position 203114171, Chr2 position 218221671, Chr2 position 219745335, Chr2 position 238341465, Chr2 position 238341542, Chr2 position 238341546, Chr2 position 238774763, Chr3 position 13323642, Chr3 position 14180153, Chr3 position 45209073, Chr3 position 45209207, Chr3 position 52525100, Chr3 position 62589658, Chr3 position 65388317, Chr3 position 65388388, Chr3 position 73599302, Chr3 position 195636893, Chr3 position 197093846, Chr4 position 3743223, Chr4 position 5755716, Chr4 position 5755717, Chr4 position 5755728, Chr4 position 5755729, Chr4 position 5755734, Chr4 position 8372861, Chr4 position 57548289, Chr5 position 1118280, Chr5 position 34564389, Chr5 position 73871907, Chr5 position 78013596, Chr5 position 78013643, Chr5 position 137802650, Chr5 position 139051189, Chr5 position 167838221, Chr5 position 177541401, Chr5 position 180018672, Chr5 position 180101026, Chr6 position 3394325, Chr6 position 3887581, Chr6 position 7236568, Chr6 position 7728692, Chr6 position 34203617, Chr6 position 37751320, Chr6 position 41410682, Chr6 position 41438516, Chr6 position 41438575, Chr6 position 43464150, Chr6 position 158734279, Chr7 position 989235, Chr7 position 2673543, Chr7 position 73508602, Chr7 position 105079565, Chr7 position 105079631, Chr7 position 151425103, Chr7 position 151425104, Chr8 position 11764017, Chr8 position 21647308, Chr8 position 22548399, Chr8 position 22548483, Chr8 position 133570537, Chr8 position 141320393, Chr8 position 141320410, Chr9 position 6566568, Chr9 position 16197862, Chr9 position 34591313, Chr9 position 98225096, Chr9 position 126126741, Chr9 position 132083428, Chr9 position 136077410, Chr9 position 139655018, Chr9 position 140205985, Chr9 position 140205985, Chr9 position 140205997, Chr10 position 3929071, Chr10 position 30047012, Chr10 position 79702989, Chr10 position 87984905, Chr10 position 94838789, Chr10 position 102131187, Chr10 position 104196489, Chr10 position 111766879, Chr10 position 112258886, Chr10 position 112258984, Chr10 position 112259015, Chr10 position 116391763, Chr10 position 120011530, Chr10 position 126172714, Chr10 position 126172747, Chr11 position 556355, Chr11 position 821282, Chr11 position 12188937, Chr11 position 12188948, Chr11 position 12188995, Chr11 position 36057726, Chr11 position 48070143, Chr11 position 48070163, Chr11 position 48070166, Chr11 position 48070174, Chr11 position 65158294, Chr11 position 65158342, Chr11 position 65297089, Chr11 position 66104481, Chr11 position 66104485, Chr11 position 66104578, Chr11 position 68608767, Chr11 position 70236292, Chr11 position 70236320, Chr11 position 70236331, Chr1l position 115530032, Chr1l position 117950310, Chr1l position 117950329, Chr1l position 117950361, Chr1l position 117950362, Chr1l position 119293593, Chr12 position 679803, Chr12 position 26039132, Chr12 position 31004558, Chr12 position 45610695, Chr12 position 45610701, Chr12 position 45610702, Chr12 position 45610706, Chr12 position 50286016, Chr12 position 52243258, Chr12 position 52243286, Chr12 position 54145732, Chr12 position 54145741, Chr12 position 54145825, Chr12 position 56115043, Chr12 position 66262229, Chr12 position 66262230, Chr12 position 66262233, Chr12 position 66262234, Chr12 position 77266621, Chr12 position 117580102, Chr12 position 123435962, Chr12 position 123436011, Chr12 position 123436065, Chr12 position 123540893, Chr13 position 20735797, Chr13 position 23500419, Chr13 position 46771519, Chr13 position 46771520, Chr13 position 53313426, Chr13 position 113807393, Chr14 position 38599118, Chr14 position 69170010, Chr14 position 75701632, Chr14 position 75701643, Chr14 position 90850454, Chr14 position 97524282, Chr14 position 103541602, Chr14 position 103768055, Chr14 position 104209000, Chr14 position 104209068, Chr14 position 104354645, Chr14 position 104360487, Chr15 position 41068807, Chr15 position 61152225, Chr15 position 61152253, Chr15 position 61152313, Chr15 position 65186440, Chr15 position 68851629, Chr15 position 70667596, Chr15 position 70767206, Chr15 position 75251486, Chr15 position 77984014, Chr15 position 77989064, Chr15 position 83952081, Chr15 position 85402496, Chr15 position 85402497, Chr15 position 99417337, Chr16 position 1231873, Chr16 position 1458639, Chr16 position 3023231, Chr16 position 23135832, Chr16 position 29616265, Chr16 position 31009547, Chr16 position 31009548, Chr16 position 31009590, Chr16 position 57793674, Chr16 position 57793715, Chr16 position 57793727, Chr16 position 70771056, Chr16 position 70771079, Chr16 position 70771141, Chr16 position 77332010, Chr16 position 78540378, Chr16 position 79333435, Chr16 position 84262419, Chr16 position 88701114, Chr16 position 89988308, Chr16 position 89988644, Chr17 position 1509928, Chr17 position 1509945, Chr17 position 1509952, Chr17 position 1509953, Chr17 position 7644013, Chr17 position 16323460, Chr17 position 16323473, Chr17 position 16924561, Chr17 position 16924562, Chr17 position 16924594, Chr17 position 17717918, Chr17 position 17718591, Chr17 position 18139506, Chr17 position 35278031, Chr17 position 39677570, Chr17 position 40826257, Chr17 position 43037426, Chr17 position 43200096, Chr17 position 43200239, Chr17 position 43510142, Chr17 position 47987828, Chr17 position 48178379, Chr17 position 48596391, Chr17 position 48764165, Chr17 position 55701962, Chr17 position 73584599, Chr17 position 73993165, Chr17 position 75827716, Chr17 position 76882243, Chr17 position 78765910, Chr17 position 79544478, Chr17 position 80696474, Chr18 position 19751759, Chr18 position 21440760, Chr18 position 45555437, Chr18 position 45555438, Chr18 position 46547891, Chr18 position 55888885, Chr18 position 56452096, Chr18 position 56452476, Chr18 position 56887181, Chr18 position 76002973, Chr18 position 77331090, Chr19 position 677895, Chr19 position 884044, Chr19 position 884059, Chr19 position 884105, Chr19 position 884115, Chr19 position 1136511, Chr19 position 1177605, Chr19 position 1177612, Chr19 position 1177640, Chr19 position 1860601, Chr19 position 1860607, Chr19 position 2503954, Chr19 position 3434917, Chr19 position 3434921, Chr19 position 3434930, Chr19 position 3434939, Chr19 position 3434952, Chr19 position 3434954, Chr19 position 3434962, Chr19 position 3434964, Chr19 position 3434979, Chr19 position 3434985, Chr19 position 4052713, Chr19 position 4052714, Chr19 position 4052749, Chr19 position 4374591, Chr19 position 5013982, Chr19 position 5048836, Chr19 position 5048867, Chr19 position 5048877, Chr19 position 8367279, Chr19 position 8428573, Chr19 position 10254577, Chr19 position 10254578, Chr19 position 10463956, Chr19 position 10464137, Chr19 position 13203671, Chr19 position 13266925, Chr19 position 13266934, Chr19 position 13266970, Chr19 position 13842142, Chr19 position 14248494, Chr19 position 15375465, Chr19 position 17218912, Chr19 position 17346702, Chr19 position 17346702, Chr19 position 18157161, Chr19 position 18157221, Chr19 position 18157258, Chr19 position 18415877, Chr19 position 18415890, Chr19 position 30606642, Chr19 position 35531842, Chr19 position 44303112, Chr19 position 47173037, Chr19 position 47316268, Chr19 position 47778278, Chr19 position 47778298, Chr20 position 34206950, Chr20 position 36771969, Chr20 position 48993661, Chr20 position 58406398, Chr20 position 61976049, Chr20 position 61976073, Chr20 position 62588571, Chr20 position 62588579, Chr22 position 19738127, Chr22 position 35965176, Chr22 position 36549809, Chr22 position 36973375, Chr22 position 37447953, Chr22 position 37914998, Chr22 position 38307317, Chr22 position 39662794, and Chr22 position 45622980.

[0067] In embodiments, the method includes detecting methylation or unmethylation of at least 7 of the following sites: Chr1 position 2996653, Chr1 position 11979164, Chr1 position 12655938, Chr1 position 16450525, Chr1 position 16450542, Chr1 position 16450545, Chr1 position 16469987, Chr1 position 17494491, Chr1 position 25473203, Chr1 position 27640460, Chr1 position 29565080, Chr1 position 38493013, Chr1 position 38493030, Chr1 position 38493074, Chr1 position 46713777, Chr1 position 46914121, Chr1 position 46955744, Chr1 position 55008344, Chr1 position 109816092, Chr1 position 109816111, Chr1 position 110074669, Chr1 position 110074681, Chr1 position 110074685, Chr1 position 150949856, Chr1 position 150949857, Chr1 position 153540282, Chr1 position 155162704, Chr1 position 155162714, Chr1 position 156676611, Chr1 position 157611881, Chr1 position 182205324, Chr1 position 204118999, Chr1 position 206741875, Chr1 position 206741989, Chr1 position 212587673, Chr1 position 212841198, Chr1 position 223403952, Chr1 position 233430972, Chr1 position 234342767, Chr2 position 3454277, Chr2 position 8793724, Chr2 position 20412441, Chr2 position 42329402, Chr2 position 42329494, Chr2 position 55289272, Chr2 position 65064865, Chr2 position 70823641, Chr2 position 73143689, Chr2 position 74454110, Chr2 position 122014529, Chr2 position 128158884, Chr2 position 128158910, Chr2 position 203114171, Chr2 position 218221671, Chr2 position 219745335, Chr2 position 238341465, Chr2 position 238341542, Chr2 position 238341546, Chr2 position 238774763, Chr3 position 13323642, Chr3 position 14180153, Chr3 position 45209073, Chr3 position 45209207, Chr3 position 52525100, Chr3 position 62589658, Chr3 position 65388317, Chr3 position 65388388, Chr3 position 73599302, Chr3 position 195636893, Chr3 position 197093846, Chr4 position 3743223, Chr4 position 5755716, Chr4 position 5755717, Chr4 position 5755728, Chr4 position 5755729, Chr4 position 5755734, Chr4 position 8372861, Chr4 position 57548289, Chr5 position 1118280, Chr5 position 34564389, Chr5 position 73871907, Chr5 position 78013596, Chr5 position 78013643, Chr5 position 137802650, Chr5 position 139051189, Chr5 position 167838221, Chr5 position 177541401, Chr5 position 180018672, Chr5 position 180101026, Chr6 position 3394325, Chr6 position 3887581, Chr6 position 7236568, Chr6 position 7728692, Chr6 position 34203617, Chr6 position 37751320, Chr6 position 41410682, Chr6 position 41438516, Chr6 position 41438575, Chr6 position 43464150, Chr6 position 158734279, Chr7 position 989235, Chr7 position 2673543, Chr7 position 73508602, Chr7 position 105079565, Chr7 position 105079631, Chr7 position 151425103, Chr7 position 151425104, Chr8 position 11764017, Chr8 position 21647308, Chr8 position 22548399, Chr8 position 22548483, Chr8 position 133570537, Chr8 position 141320393, Chr8 position 141320410, Chr9 position 6566568, Chr9 position 16197862, Chr9 position 34591313, Chr9 position 98225096, Chr9 position 126126741, Chr9 position 132083428, Chr9 position 136077410, Chr9 position 139655018, Chr9 position 140205985, Chr9 position 140205985, Chr9 position 140205997, Chr10 position 3929071, Chr10 position 30047012, Chr10 position 79702989, Chr10 position 87984905, Chr10 position 94838789, Chr10 position 102131187, Chr10 position 104196489, Chr10 position 111766879, Chr10 position 112258886, Chr10 position 112258984, Chr10 position 112259015, Chr10 position 116391763, Chr10 position 120011530, Chr10 position 126172714, Chr10 position 126172747, Chr11 position 556355, Chr11 position 821282, Chr11 position 12188937, Chr11 position 12188948, Chr11 position 12188995, Chr11 position 36057726, Chr11 position 48070143, Chr11 position 48070163, Chr11 position 48070166, Chr11 position 48070174, Chr11 position 65158294, Chr11 position 65158342, Chr11 position 65297089, Chr11 position 66104481, Chr11 position 66104485, Chr11 position 66104578, Chr11 position 68608767, Chr11 position 70236292, Chr11 position 70236320, Chr11 position 70236331, Chr1l position 115530032, Chr1l position 117950310, Chr1l position 117950329, Chr1l position 117950361, Chr1l position 117950362, Chr1l position 119293593, Chr12 position 679803, Chr12 position 26039132, Chr12 position 31004558, Chr12 position 45610695, Chr12 position 45610701, Chr12 position 45610702, Chr12 position 45610706, Chr12 position 50286016, Chr12 position 52243258, Chr12 position 52243286, Chr12 position 54145732, Chr12 position 54145741, Chr12 position 54145825, Chr12 position 56115043, Chr12 position 66262229, Chr12 position 66262230, Chr12 position 66262233, Chr12 position 66262234, Chr12 position 77266621, Chr12 position 117580102, Chr12 position 123435962, Chr12 position 123436011, Chr12 position 123436065, Chr12 position 123540893, Chr13 position 20735797, Chr13 position 23500419, Chr13 position 46771519, Chr13 position 46771520, Chr13 position 53313426, Chr13 position 113807393, Chr14 position 38599118, Chr14 position 69170010, Chr14 position 75701632, Chr14 position 75701643, Chr14 position 90850454, Chr14 position 97524282, Chr14 position 103541602, Chr14 position 103768055, Chr14 position 104209000, Chr14 position 104209068, Chr14 position 104354645, Chr14 position 104360487, Chr15 position 41068807, Chr15 position 61152225, Chr15 position 61152253, Chr15 position 61152313, Chr15 position 65186440, Chr15 position 68851629, Chr15 position 70667596, Chr15 position 70767206, Chr15 position 75251486, Chr15 position 77984014, Chr15 position 77989064, Chr15 position 83952081, Chr15 position 85402496, Chr15 position 85402497, Chr15 position 99417337, Chr16 position 1231873, Chr16 position 1458639, Chr16 position 3023231, Chr16 position 23135832, Chr16 position 29616265, Chr16 position 31009547, Chr16 position 31009548, Chr16 position 31009590, Chr16 position 57793674, Chr16 position 57793715, Chr16 position 57793727, Chr16 position 70771056, Chr16 position 70771079, Chr16 position 70771141, Chr16 position 77332010, Chr16 position 78540378, Chr16 position 79333435, Chr16 position 84262419, Chr16 position 88701114, Chr16 position 89988308, Chr16 position 89988644, Chr17 position 1509928, Chr17 position 1509945, Chr17 position 1509952, Chr17 position 1509953, Chr17 position 7644013, Chr17 position 16323460, Chr17 position 16323473, Chr17 position 16924561, Chr17 position 16924562, Chr17 position 16924594, Chr17 position 17717918, Chr17 position 17718591, Chr17 position 18139506, Chr17 position 35278031, Chr17 position 39677570, Chr17 position 40826257, Chr17 position 43037426, Chr17 position 43200096, Chr17 position 43200239, Chr17 position 43510142, Chr17 position 47987828, Chr17 position 48178379, Chr17 position 48596391, Chr17 position 48764165, Chr17 position 55701962, Chr17 position 73584599, Chr17 position 73993165, Chr17 position 75827716, Chr17 position 76882243, Chr17 position 78765910, Chr17 position 79544478, Chr17 position 80696474, Chr18 position 19751759, Chr18 position 21440760, Chr18 position 45555437, Chr18 position 45555438, Chr18 position 46547891, Chr18 position 55888885, Chr18 position 56452096, Chr18 position 56452476, Chr18 position 56887181, Chr18 position 76002973, Chr18 position 77331090, Chr19 position 677895, Chr19 position 884044, Chr19 position 884059, Chr19 position 884105, Chr19 position 884115, Chr19 position 1136511, Chr19 position 1177605, Chr19 position 1177612, Chr19 position 1177640, Chr19 position 1860601, Chr19 position 1860607, Chr19 position 2503954, Chr19 position 3434917, Chr19 position 3434921, Chr19 position 3434930, Chr19 position 3434939, Chr19 position 3434952, Chr19 position 3434954, Chr19 position 3434962, Chr19 position 3434964, Chr19 position 3434979, Chr19 position 3434985, Chr19 position 4052713, Chr19 position 4052714, Chr19 position 4052749, Chr19 position 4374591, Chr19 position 5013982, Chr19 position 5048836, Chr19 position 5048867, Chr19 position 5048877, Chr19 position 8367279, Chr19 position 8428573, Chr19 position 10254577, Chr19 position 10254578, Chr19 position 10463956, Chr19 position 10464137, Chr19 position 13203671, Chr19 position 13266925, Chr19 position 13266934, Chr19 position 13266970, Chr19 position 13842142, Chr19 position 14248494, Chr19 position 15375465, Chr19 position 17218912, Chr19 position 17346702, Chr19 position 17346702, Chr19 position 18157161, Chr19 position 18157221, Chr19 position 18157258, Chr19 position 18415877, Chr19 position 18415890, Chr19 position 30606642, Chr19 position 35531842, Chr19 position 44303112, Chr19 position 47173037, Chr19 position 47316268, Chr19 position 47778278, Chr19 position 47778298, Chr20 position 34206950, Chr20 position 36771969, Chr20 position 48993661, Chr20 position 58406398, Chr20 position 61976049, Chr20 position 61976073, Chr20 position 62588571, Chr20 position 62588579, Chr22 position 19738127, Chr22 position 35965176, Chr22 position 36549809, Chr22 position 36973375, Chr22 position 37447953, Chr22 position 37914998, Chr22 position 38307317, Chr22 position 39662794, and Chr22 position 45622980.

[0068] In embodiments, the method includes detecting methylation or unmethylation of at least 8 of the following sites: Chr1 position 2996653, Chr1 position 11979164, Chr1 position 12655938, Chr1 position 16450525, Chr1 position 16450542, Chr1 position 16450545, Chr1 position 16469987, Chr1 position 17494491, Chr1 position 25473203, Chr1 position 27640460, Chr1 position 29565080, Chr1 position 38493013, Chr1 position 38493030, Chr1 position 38493074, Chr1 position 46713777, Chr1 position 46914121, Chr1 position 46955744, Chr1 position 55008344, Chr1 position 109816092, Chr1 position 109816111, Chr1 position 110074669, Chr1 position 110074681, Chr1 position 110074685, Chr1 position 150949856, Chr1 position 150949857, Chr1 position 153540282, Chr1 position 155162704, Chr1 position 155162714, Chr1 position 156676611, Chr1 position 157611881, Chr1 position 182205324, Chr1 position 204118999, Chr1 position 206741875, Chr1 position 206741989, Chr1 position 212587673, Chr1 position 212841198, Chr1 position 223403952, Chr1 position 233430972, Chr1 position 234342767, Chr2 position 3454277, Chr2 position 8793724, Chr2 position 20412441, Chr2 position 42329402, Chr2 position 42329494, Chr2 position 55289272, Chr2 position 65064865, Chr2 position 70823641, Chr2 position 73143689, Chr2 position 74454110, Chr2 position 122014529, Chr2 position 128158884, Chr2 position 128158910, Chr2 position 203114171, Chr2 position 218221671, Chr2 position 219745335, Chr2 position 238341465, Chr2 position 238341542, Chr2 position 238341546, Chr2 position 238774763, Chr3 position 13323642, Chr3 position 14180153, Chr3 position 45209073, Chr3 position 45209207, Chr3 position 52525100, Chr3 position 62589658, Chr3 position 65388317, Chr3 position 65388388, Chr3 position 73599302, Chr3 position 195636893, Chr3 position 197093846, Chr4 position 3743223, Chr4 position 5755716, Chr4 position 5755717, Chr4 position 5755728, Chr4 position 5755729, Chr4 position 5755734, Chr4 position 8372861, Chr4 position 57548289, Chr5 position 1118280, Chr5 position 34564389, Chr5 position 73871907, Chr5 position 78013596, Chr5 position 78013643, Chr5 position 137802650, Chr5 position 139051189, Chr5 position 167838221, Chr5 position 177541401, Chr5 position 180018672, Chr5 position 180101026, Chr6 position 3394325, Chr6 position 3887581, Chr6 position 7236568, Chr6 position 7728692, Chr6 position 34203617, Chr6 position 37751320, Chr6 position 41410682, Chr6 position 41438516, Chr6 position 41438575, Chr6 position 43464150, Chr6 position 158734279, Chr7 position 989235, Chr7 position 2673543, Chr7 position 73508602, Chr7 position 105079565, Chr7 position 105079631, Chr7 position 151425103, Chr7 position 151425104, Chr8 position 11764017, Chr8 position 21647308, Chr8 position 22548399, Chr8 position 22548483, Chr8 position 133570537, Chr8 position 141320393, Chr8 position 141320410, Chr9 position 6566568, Chr9 position 16197862, Chr9 position 34591313, Chr9 position 98225096, Chr9 position 126126741, Chr9 position 132083428, Chr9 position 136077410, Chr9 position 139655018, Chr9 position 140205985, Chr9 position 140205985, Chr9 position 140205997, Chr10 position 3929071, Chr10 position 30047012, Chr10 position 79702989, Chr10 position 87984905, Chr10 position 94838789, Chr10 position 102131187, Chr10 position 104196489, Chr10 position 111766879, Chr10 position 112258886, Chr10 position 112258984, Chr10 position 112259015, Chr10 position 116391763, Chr10 position 120011530, Chr10 position 126172714, Chr10 position 126172747, Chr11 position 556355, Chr11 position 821282, Chr11 position 12188937, Chr11 position 12188948, Chr11 position 12188995, Chr11 position 36057726, Chr11 position 48070143, Chr11 position 48070163, Chr11 position 48070166, Chr11 position 48070174, Chr11 position 65158294, Chr11 position 65158342, Chr11 position 65297089, Chr11 position 66104481, Chr11 position 66104485, Chr11 position 66104578, Chr11 position 68608767, Chr11 position 70236292, Chr11 position 70236320, Chr11 position 70236331, Chr1l position 115530032, Chr1l position 117950310, Chr1l position 117950329, Chr1l position 117950361, Chr1l position 117950362, Chr1l position 119293593, Chr12 position 679803, Chr12 position 26039132, Chr12 position 31004558, Chr12 position 45610695, Chr12 position 45610701, Chr12 position 45610702, Chr12 position 45610706, Chr12 position 50286016, Chr12 position 52243258, Chr12 position 52243286, Chr12 position 54145732, Chr12 position 54145741, Chr12 position 54145825, Chr12 position 56115043, Chr12 position 66262229, Chr12 position 66262230, Chr12 position 66262233, Chr12 position 66262234, Chr12 position 77266621, Chr12 position 117580102, Chr12 position 123435962, Chr12 position 123436011, Chr12 position 123436065, Chr12 position 123540893, Chr13 position 20735797, Chr13 position 23500419, Chr13 position 46771519, Chr13 position 46771520, Chr13 position 53313426, Chr13 position 113807393, Chr14 position 38599118, Chr14 position 69170010, Chr14 position 75701632, Chr14 position 75701643, Chr14 position 90850454, Chr14 position 97524282, Chr14 position 103541602, Chr14 position 103768055, Chr14 position 104209000, Chr14 position 104209068, Chr14 position 104354645, Chr14 position 104360487, Chr15 position 41068807, Chr15 position 61152225, Chr15 position 61152253, Chr15 position 61152313, Chr15 position 65186440, Chr15 position 68851629, Chr15 position 70667596, Chr15 position 70767206, Chr15 position 75251486, Chr15 position 77984014, Chr15 position 77989064, Chr15 position 83952081, Chr15 position 85402496, Chr15 position 85402497, Chr15 position 99417337, Chr16 position 1231873, Chr16 position 1458639, Chr16 position 3023231, Chr16 position 23135832, Chr16 position 29616265, Chr16 position 31009547, Chr16 position 31009548, Chr16 position 31009590, Chr16 position 57793674, Chr16 position 57793715, Chr16 position 57793727, Chr16 position 70771056, Chr16 position 70771079, Chr16 position 70771141, Chr16 position 77332010, Chr16 position 78540378, Chr16 position 79333435, Chr16 position 84262419, Chr16 position 88701114, Chr16 position 89988308, Chr16 position 89988644, Chr17 position 1509928, Chr17 position 1509945, Chr17 position 1509952, Chr17 position 1509953, Chr17 position 7644013, Chr17 position 16323460, Chr17 position 16323473, Chr17 position 16924561, Chr17 position 16924562, Chr17 position 16924594, Chr17 position 17717918, Chr17 position 17718591, Chr17 position 18139506, Chr17 position 35278031, Chr17 position 39677570, Chr17 position 40826257, Chr17 position 43037426, Chr17 position 43200096, Chr17 position 43200239, Chr17 position 43510142, Chr17 position 47987828, Chr17 position 48178379, Chr17 position 48596391, Chr17 position 48764165, Chr17 position 55701962, Chr17 position 73584599, Chr17 position 73993165, Chr17 position 75827716, Chr17 position 76882243, Chr17 position 78765910, Chr17 position 79544478, Chr17 position 80696474, Chr18 position 19751759, Chr18 position 21440760, Chr18 position 45555437, Chr18 position 45555438, Chr18 position 46547891, Chr18 position 55888885, Chr18 position 56452096, Chr18 position 56452476, Chr18 position 56887181, Chr18 position 76002973, Chr18 position 77331090, Chr19 position 677895, Chr19 position 884044, Chr19 position 884059, Chr19 position 884105, Chr19 position 884115, Chr19 position 1136511, Chr19 position 1177605, Chr19 position 1177612, Chr19 position 1177640, Chr19 position 1860601, Chr19 position 1860607, Chr19 position 2503954, Chr19 position 3434917, Chr19 position 3434921, Chr19 position 3434930, Chr19 position 3434939, Chr19 position 3434952, Chr19 position 3434954, Chr19 position 3434962, Chr19 position 3434964, Chr19 position 3434979, Chr19 position 3434985, Chr19 position 4052713, Chr19 position 4052714, Chr19 position 4052749, Chr19 position 4374591, Chr19 position 5013982, Chr19 position 5048836, Chr19 position 5048867, Chr19 position 5048877, Chr19 position 8367279, Chr19 position 8428573, Chr19 position 10254577, Chr19 position 10254578, Chr19 position 10463956, Chr19 position 10464137, Chr19 position 13203671, Chr19 position 13266925, Chr19 position 13266934, Chr19 position 13266970, Chr19 position 13842142, Chr19 position 14248494, Chr19 position 15375465, Chr19 position 17218912, Chr19 position 17346702, Chr19 position 17346702, Chr19 position 18157161, Chr19 position 18157221, Chr19 position 18157258, Chr19 position 18415877, Chr19 position 18415890, Chr19 position 30606642, Chr19 position 35531842, Chr19 position 44303112, Chr19 position 47173037, Chr19 position 47316268, Chr19 position 47778278, Chr19 position 47778298, Chr20 position 34206950, Chr20 position 36771969, Chr20 position 48993661, Chr20 position 58406398, Chr20 position 61976049, Chr20 position 61976073, Chr20 position 62588571, Chr20 position 62588579, Chr22 position 19738127, Chr22 position 35965176, Chr22 position 36549809, Chr22 position 36973375, Chr22 position 37447953, Chr22 position 37914998, Chr22 position 38307317, Chr22 position 39662794, and Chr22 position 45622980.

[0069] In embodiments, the method includes detecting methylation or unmethylation of at least 9 of the following sites: Chr1 position 2996653, Chr1 position 11979164, Chr1 position 12655938, Chr1 position 16450525, Chr1 position 16450542, Chr1 position 16450545, Chr1 position 16469987, Chr1 position 17494491, Chr1 position 25473203, Chr1 position 27640460, Chr1 position 29565080, Chr1 position 38493013, Chr1 position 38493030, Chr1 position 38493074, Chr1 position 46713777, Chr1 position 46914121, Chr1 position 46955744, Chr1 position 55008344, Chr1 position 109816092, Chr1 position 109816111, Chr1 position 110074669, Chr1 position 110074681, Chr1 position 110074685, Chr1 position 150949856, Chr1 position 150949857, Chr1 position 153540282, Chr1 position 155162704, Chr1 position 155162714, Chr1 position 156676611, Chr1 position 157611881, Chr1 position 182205324, Chr1 position 204118999, Chr1 position 206741875, Chr1 position 206741989, Chr1 position 212587673, Chr1 position 212841198, Chr1 position 223403952, Chr1 position 233430972, Chr1 position 234342767, Chr2 position 3454277, Chr2 position 8793724, Chr2 position 20412441, Chr2 position 42329402, Chr2 position 42329494, Chr2 position 55289272, Chr2 position 65064865, Chr2 position 70823641, Chr2 position 73143689, Chr2 position 74454110, Chr2 position 122014529, Chr2 position 128158884, Chr2 position 128158910, Chr2 position 203114171, Chr2 position 218221671, Chr2 position 219745335, Chr2 position 238341465, Chr2 position 238341542, Chr2 position 238341546, Chr2 position 238774763, Chr3 position 13323642, Chr3 position 14180153, Chr3 position 45209073, Chr3 position 45209207, Chr3 position 52525100, Chr3 position 62589658, Chr3 position 65388317, Chr3 position 65388388, Chr3 position 73599302, Chr3 position 195636893, Chr3 position 197093846, Chr4 position 3743223, Chr4 position 5755716, Chr4 position 5755717, Chr4 position 5755728, Chr4 position 5755729, Chr4 position 5755734, Chr4 position 8372861, Chr4 position 57548289, Chr5 position 1118280, Chr5 position 34564389, Chr5 position 73871907, Chr5 position 78013596, Chr5 position 78013643, Chr5 position 137802650, Chr5 position 139051189, Chr5 position 167838221, Chr5 position 177541401, Chr5 position 180018672, Chr5 position 180101026, Chr6 position 3394325, Chr6 position 3887581, Chr6 position 7236568, Chr6 position 7728692, Chr6 position 34203617, Chr6 position 37751320, Chr6 position 41410682, Chr6 position 41438516, Chr6 position 41438575, Chr6 position 43464150, Chr6 position 158734279, Chr7 position 989235, Chr7 position 2673543, Chr7 position 73508602, Chr7 position 105079565, Chr7 position 105079631, Chr7 position 151425103, Chr7 position 151425104, Chr8 position 11764017, Chr8 position 21647308, Chr8 position 22548399, Chr8 position 22548483, Chr8 position 133570537, Chr8 position 141320393, Chr8 position 141320410, Chr9 position 6566568, Chr9 position 16197862, Chr9 position 34591313, Chr9 position 98225096, Chr9 position 126126741, Chr9 position 132083428, Chr9 position 136077410, Chr9 position 139655018, Chr9 position 140205985, Chr9 position 140205985, Chr9 position 140205997, Chr10 position 3929071, Chr10 position 30047012, Chr10 position 79702989, Chr10 position 87984905, Chr10 position 94838789, Chr10 position 102131187, Chr10 position 104196489, Chr10 position 111766879, Chr10 position 112258886, Chr10 position 112258984, Chr10 position 112259015, Chr10 position 116391763, Chr10 position 120011530, Chr10 position 126172714, Chr10 position 126172747, Chr11 position 556355, Chr11 position 821282, Chr11 position 12188937, Chr11 position 12188948, Chr11 position 12188995, Chr11 position 36057726, Chr11 position 48070143, Chr11 position 48070163, Chr11 position 48070166, Chr11 position 48070174, Chr11 position 65158294, Chr11 position 65158342, Chr11 position 65297089, Chr11 position 66104481, Chr11 position 66104485, Chr11 position 66104578, Chr11 position 68608767, Chr11 position 70236292, Chr11 position 70236320, Chr11 position 70236331, Chr1l position 115530032, Chr1l position 117950310, Chr1l position 117950329, Chr1l position 117950361, Chr1l position 117950362, Chr1l position 119293593, Chr12 position 679803, Chr12 position 26039132, Chr12 position 31004558, Chr12 position 45610695, Chr12 position 45610701, Chr12 position 45610702, Chr12 position 45610706, Chr12 position 50286016, Chr12 position 52243258, Chr12 position 52243286, Chr12 position 54145732, Chr12 position 54145741, Chr12 position 54145825, Chr12 position 56115043, Chr12 position 66262229, Chr12 position 66262230, Chr12 position 66262233, Chr12 position 66262234, Chr12 position 77266621, Chr12 position 117580102, Chr12 position 123435962, Chr12 position 123436011, Chr12 position 123436065, Chr12 position 123540893, Chr13 position 20735797, Chr13 position 23500419, Chr13 position 46771519, Chr13 position 46771520, Chr13 position 53313426, Chr13 position 113807393, Chr14 position 38599118, Chr14 position 69170010, Chr14 position 75701632, Chr14 position 75701643, Chr14 position 90850454, Chr14 position 97524282, Chr14 position 103541602, Chr14 position 103768055, Chr14 position 104209000, Chr14 position 104209068, Chr14 position 104354645, Chr14 position 104360487, Chr15 position 41068807, Chr15 position 61152225, Chr15 position 61152253, Chr15 position 61152313, Chr15 position 65186440, Chr15 position 68851629, Chr15 position 70667596, Chr15 position 70767206, Chr15 position 75251486, Chr15 position 77984014, Chr15 position 77989064, Chr15 position 83952081, Chr15 position 85402496, Chr15 position 85402497, Chr15 position 99417337, Chr16 position 1231873, Chr16 position 1458639, Chr16 position 3023231, Chr16 position 23135832, Chr16 position 29616265, Chr16 position 31009547, Chr16 position 31009548, Chr16 position 31009590, Chr16 position 57793674, Chr16 position 57793715, Chr16 position 57793727, Chr16 position 70771056, Chr16 position 70771079, Chr16 position 70771141, Chr16 position 77332010, Chr16 position 78540378, Chr16 position 79333435, Chr16 position 84262419, Chr16 position 88701114, Chr16 position 89988308, Chr16 position 89988644, Chr17 position 1509928, Chr17 position 1509945, Chr17 position 1509952, Chr17 position 1509953, Chr17 position 7644013, Chr17 position 16323460, Chr17 position 16323473, Chr17 position 16924561, Chr17 position 16924562, Chr17 position 16924594, Chr17 position 17717918, Chr17 position 17718591, Chr17 position 18139506, Chr17 position 35278031, Chr17 position 39677570, Chr17 position 40826257, Chr17 position 43037426, Chr17 position 43200096, Chr17 position 43200239, Chr17 position 43510142, Chr17 position 47987828, Chr17 position 48178379, Chr17 position 48596391, Chr17 position 48764165, Chr17 position 55701962, Chr17 position 73584599, Chr17 position 73993165, Chr17 position 75827716, Chr17 position 76882243, Chr17 position 78765910, Chr17 position 79544478, Chr17 position 80696474, Chr18 position 19751759, Chr18 position 21440760, Chr18 position 45555437, Chr18 position 45555438, Chr18 position 46547891, Chr18 position 55888885, Chr18 position 56452096, Chr18 position 56452476, Chr18 position 56887181, Chr18 position 76002973, Chr18 position 77331090, Chr19 position 677895, Chr19 position 884044, Chr19 position 884059, Chr19 position 884105, Chr19 position 884115, Chr19 position 1136511, Chr19 position 1177605, Chr19 position 1177612, Chr19 position 1177640, Chr19 position 1860601, Chr19 position 1860607, Chr19 position 2503954, Chr19 position 3434917, Chr19 position 3434921, Chr19 position 3434930, Chr19 position 3434939, Chr19 position 3434952, Chr19 position 3434954, Chr19 position 3434962, Chr19 position 3434964, Chr19 position 3434979, Chr19 position 3434985, Chr19 position 4052713, Chr19 position 4052714, Chr19 position 4052749, Chr19 position 4374591, Chr19 position 5013982, Chr19 position 5048836, Chr19 position 5048867, Chr19 position 5048877, Chr19 position 8367279, Chr19 position 8428573, Chr19 position 10254577, Chr19 position 10254578, Chr19 position 10463956, Chr19 position 10464137, Chr19 position 13203671, Chr19 position 13266925, Chr19 position 13266934, Chr19 position 13266970, Chr19 position 13842142, Chr19 position 14248494, Chr19 position 15375465, Chr19 position 17218912, Chr19 position 17346702, Chr19 position 17346702, Chr19 position 18157161, Chr19 position 18157221, Chr19 position 18157258, Chr19 position 18415877, Chr19 position 18415890, Chr19 position 30606642, Chr19 position 35531842, Chr19 position 44303112, Chr19 position 47173037, Chr19 position 47316268, Chr19 position 47778278, Chr19 position 47778298, Chr20 position 34206950, Chr20 position 36771969, Chr20 position 48993661, Chr20 position 58406398, Chr20 position 61976049, Chr20 position 61976073, Chr20 position 62588571, Chr20 position 62588579, Chr22 position 19738127, Chr22 position 35965176, Chr22 position 36549809, Chr22 position 36973375, Chr22 position 37447953, Chr22 position 37914998, Chr22 position 38307317, Chr22 position 39662794, and Chr22 position 45622980.

[0070] In embodiments, the method includes detecting methylation or unmethylation of at least 10 of the following sites: Chr1 position 2996653, Chr1 position 11979164, Chr1 position 12655938, Chr1 position 16450525, Chr1 position 16450542, Chr1 position 16450545, Chr1 position 16469987, Chr1 position 17494491, Chr1 position 25473203, Chr1 position 27640460, Chr1 position 29565080, Chr1 position 38493013, Chr1 position 38493030, Chr1 position 38493074, Chr1 position 46713777, Chr1 position 46914121, Chr1 position 46955744, Chr1 position 55008344, Chr1 position 109816092, Chr1 position 109816111, Chr1 position 110074669, Chr1 position 110074681, Chr1 position 110074685, Chr1 position 150949856, Chr1 position 150949857, Chr1 position 153540282, Chr1 position 155162704, Chr1 position 155162714, Chr1 position 156676611, Chr1 position 157611881, Chr1 position 182205324, Chr1 position 204118999, Chr1 position 206741875, Chr1 position 206741989, Chr1 position 212587673, Chr1 position 212841198, Chr1 position 223403952, Chr1 position 233430972, Chr1 position 234342767, Chr2 position 3454277, Chr2 position 8793724, Chr2 position 20412441, Chr2 position 42329402, Chr2 position 42329494, Chr2 position 55289272, Chr2 position 65064865, Chr2 position 70823641, Chr2 position 73143689, Chr2 position 74454110, Chr2 position 122014529, Chr2 position 128158884, Chr2 position 128158910, Chr2 position 203114171, Chr2 position 218221671, Chr2 position 219745335, Chr2 position 238341465, Chr2 position 238341542, Chr2 position 238341546, Chr2 position 238774763, Chr3 position 13323642, Chr3 position 14180153, Chr3 position 45209073, Chr3 position 45209207, Chr3 position 52525100, Chr3 position 62589658, Chr3 position 65388317, Chr3 position 65388388, Chr3 position 73599302, Chr3 position 195636893, Chr3 position 197093846, Chr4 position 3743223, Chr4 position 5755716, Chr4 position 5755717, Chr4 position 5755728, Chr4 position 5755729, Chr4 position 5755734, Chr4 position 8372861, Chr4 position 57548289, Chr5 position 1118280, Chr5 position 34564389, Chr5 position 73871907, Chr5 position 78013596, Chr5 position 78013643, Chr5 position 137802650, Chr5 position 139051189, Chr5 position 167838221, Chr5 position 177541401, Chr5 position 180018672, Chr5 position 180101026, Chr6 position 3394325, Chr6 position 3887581, Chr6 position 7236568, Chr6 position 7728692, Chr6 position 34203617, Chr6 position 37751320, Chr6 position 41410682, Chr6 position 41438516, Chr6 position 41438575, Chr6 position 43464150, Chr6 position 158734279, Chr7 position 989235, Chr7 position 2673543, Chr7 position 73508602, Chr7 position 105079565, Chr7 position 105079631, Chr7 position 151425103, Chr7 position 151425104, Chr8 position 11764017, Chr8 position 21647308, Chr8 position 22548399, Chr8 position 22548483, Chr8 position 133570537, Chr8 position 141320393, Chr8 position 141320410, Chr9 position 6566568, Chr9 position 16197862, Chr9 position 34591313, Chr9 position 98225096, Chr9 position 126126741, Chr9 position 132083428, Chr9 position 136077410, Chr9 position 139655018, Chr9 position 140205985, Chr9 position 140205985, Chr9 position 140205997, Chr10 position 3929071, Chr10 position 30047012, Chr10 position 79702989, Chr10 position 87984905, Chr10 position 94838789, Chr10 position 102131187, Chr10 position 104196489, Chr10 position 111766879, Chr10 position 112258886, Chr10 position 112258984, Chr10 position 112259015, Chr10 position 116391763, Chr10 position 120011530, Chr10 position 126172714, Chr10 position 126172747, Chr11 position 556355, Chr11 position 821282, Chr11 position 12188937, Chr11 position 12188948, Chr11 position 12188995, Chr11 position 36057726, Chr11 position 48070143, Chr11 position 48070163, Chr11 position 48070166, Chr11 position 48070174, Chr11 position 65158294, Chr11 position 65158342, Chr11 position 65297089, Chr11 position 66104481, Chr11 position 66104485, Chr11 position 66104578, Chr11 position 68608767, Chr11 position 70236292, Chr11 position 70236320, Chr11 position 70236331, Chr1l position 115530032, Chr1l position 117950310, Chr1l position 117950329, Chr1l position 117950361, Chr1l position 117950362, Chr1l position 119293593, Chr12 position 679803, Chr12 position 26039132, Chr12 position 31004558, Chr12 position 45610695, Chr12 position 45610701, Chr12 position 45610702, Chr12 position 45610706, Chr12 position 50286016, Chr12 position 52243258, Chr12 position 52243286, Chr12 position 54145732, Chr12 position 54145741, Chr12 position 54145825, Chr12 position 56115043, Chr12 position 66262229, Chr12 position 66262230, Chr12 position 66262233, Chr12 position 66262234, Chr12 position 77266621, Chr12 position 117580102, Chr12 position 123435962, Chr12 position 123436011, Chr12 position 123436065, Chr12 position 123540893, Chr13 position 20735797, Chr13 position 23500419, Chr13 position 46771519, Chr13 position 46771520, Chr13 position 53313426, Chr13 position 113807393, Chr14 position 38599118, Chr14 position 69170010, Chr14 position 75701632, Chr14 position 75701643, Chr14 position 90850454, Chr14 position 97524282, Chr14 position 103541602, Chr14 position 103768055, Chr14 position 104209000, Chr14 position 104209068, Chr14 position 104354645, Chr14 position 104360487, Chr15 position 41068807, Chr15 position 61152225, Chr15 position 61152253, Chr15 position 61152313, Chr15 position 65186440, Chr15 position 68851629, Chr15 position 70667596, Chr15 position 70767206, Chr15 position 75251486, Chr15 position 77984014, Chr15 position 77989064, Chr15 position 83952081, Chr15 position 85402496, Chr15 position 85402497, Chr15 position 99417337, Chr16 position 1231873, Chr16 position 1458639, Chr16 position 3023231, Chr16 position 23135832, Chr16 position 29616265, Chr16 position 31009547, Chr16 position 31009548, Chr16 position 31009590, Chr16 position 57793674, Chr16 position 57793715, Chr16 position 57793727, Chr16 position 70771056, Chr16 position 70771079, Chr16 position 70771141, Chr16 position 77332010, Chr16 position 78540378, Chr16 position 79333435, Chr16 position 84262419, Chr16 position 88701114, Chr16 position 89988308, Chr16 position 89988644, Chr17 position 1509928, Chr17 position 1509945, Chr17 position 1509952, Chr17 position 1509953, Chr17 position 7644013, Chr17 position 16323460, Chr17 position 16323473, Chr17 position 16924561, Chr17 position 16924562, Chr17 position 16924594, Chr17 position 17717918, Chr17 position 17718591, Chr17 position 18139506, Chr17 position 35278031, Chr17 position 39677570, Chr17 position 40826257, Chr17 position 43037426, Chr17 position 43200096, Chr17 position 43200239, Chr17 position 43510142, Chr17 position 47987828, Chr17 position 48178379, Chr17 position 48596391, Chr17 position 48764165, Chr17 position 55701962, Chr17 position 73584599, Chr17 position 73993165, Chr17 position 75827716, Chr17 position 76882243, Chr17 position 78765910, Chr17 position 79544478, Chr17 position 80696474, Chr18 position 19751759, Chr18 position 21440760, Chr18 position 45555437, Chr18 position 45555438, Chr18 position 46547891, Chr18 position 55888885, Chr18 position 56452096, Chr18 position 56452476, Chr18 position 56887181, Chr18 position 76002973, Chr18 position 77331090, Chr19 position 677895, Chr19 position 884044, Chr19 position 884059, Chr19 position 884105, Chr19 position 884115, Chr19 position 1136511, Chr19 position 1177605, Chr19 position 1177612, Chr19 position 1177640, Chr19 position 1860601, Chr19 position 1860607, Chr19 position 2503954, Chr19 position 3434917, Chr19 position 3434921, Chr19 position 3434930, Chr19 position 3434939, Chr19 position 3434952, Chr19 position 3434954, Chr19 position 3434962, Chr19 position 3434964, Chr19 position 3434979, Chr19 position 3434985, Chr19 position 4052713, Chr19 position 4052714, Chr19 position 4052749, Chr19 position 4374591, Chr19 position 5013982, Chr19 position 5048836, Chr19 position 5048867, Chr19 position 5048877, Chr19 position 8367279, Chr19 position 8428573, Chr19 position 10254577, Chr19 position 10254578, Chr19 position 10463956, Chr19 position 10464137, Chr19 position 13203671, Chr19 position 13266925, Chr19 position 13266934, Chr19 position 13266970, Chr19 position 13842142, Chr19 position 14248494, Chr19 position 15375465, Chr19 position 17218912, Chr19 position 17346702, Chr19 position 17346702, Chr19 position 18157161, Chr19 position 18157221, Chr19 position 18157258, Chr19 position 18415877, Chr19 position 18415890, Chr19 position 30606642, Chr19 position 35531842, Chr19 position 44303112, Chr19 position 47173037, Chr19 position 47316268, Chr19 position 47778278, Chr19 position 47778298, Chr20 position 34206950, Chr20 position 36771969, Chr20 position 48993661, Chr20 position 58406398, Chr20 position 61976049, Chr20 position 61976073, Chr20 position 62588571, Chr20 position 62588579, Chr22 position 19738127, Chr22 position 35965176, Chr22 position 36549809, Chr22 position 36973375, Chr22 position 37447953, Chr22 position 37914998, Chr22 position 38307317, Chr22 position 39662794, and Chr22 position 45622980.

[0071] In embodiments, the method includes detecting methylation or unmethylation of at least 50 of the following sites: Chr1 position 2996653, Chr1 position 11979164, Chr1 position 12655938, Chr1 position 16450525, Chr1 position 16450542, Chr1 position 16450545, Chr1 position 16469987, Chr1 position 17494491, Chr1 position 25473203, Chr1 position 27640460, Chr1 position 29565080, Chr1 position 38493013, Chr1 position 38493030, Chr1 position 38493074, Chr1 position 46713777, Chr1 position 46914121, Chr1 position 46955744, Chr1 position 55008344, Chr1 position 109816092, Chr1 position 109816111, Chr1 position 110074669, Chr1 position 110074681, Chr1 position 110074685, Chr1 position 150949856, Chr1 position 150949857, Chr1 position 153540282, Chr1 position 155162704, Chr1 position 155162714, Chr1 position 156676611, Chr1 position 157611881, Chr1 position 182205324, Chr1 position 204118999, Chr1 position 206741875, Chr1 position 206741989, Chr1 position 212587673, Chr1 position 212841198, Chr1 position 223403952, Chr1 position 233430972, Chr1 position 234342767, Chr2 position 3454277, Chr2 position 8793724, Chr2 position 20412441, Chr2 position 42329402, Chr2 position 42329494, Chr2 position 55289272, Chr2 position 65064865, Chr2 position 70823641, Chr2 position 73143689, Chr2 position 74454110, Chr2 position 122014529, Chr2 position 128158884, Chr2 position 128158910, Chr2 position 203114171, Chr2 position 218221671, Chr2 position 219745335, Chr2 position 238341465, Chr2 position 238341542, Chr2 position 238341546, Chr2 position 238774763, Chr3 position 13323642, Chr3 position 14180153, Chr3 position 45209073, Chr3 position 45209207, Chr3 position 52525100, Chr3 position 62589658, Chr3 position 65388317, Chr3 position 65388388, Chr3 position 73599302, Chr3 position 195636893, Chr3 position 197093846, Chr4 position 3743223, Chr4 position 5755716, Chr4 position 5755717, Chr4 position 5755728, Chr4 position 5755729, Chr4 position 5755734, Chr4 position 8372861, Chr4 position 57548289, Chr5 position 1118280, Chr5 position 34564389, Chr5 position 73871907, Chr5 position 78013596, Chr5 position 78013643, Chr5 position 137802650, Chr5 position 139051189, Chr5 position 167838221, Chr5 position 177541401, Chr5 position 180018672, Chr5 position 180101026, Chr6 position 3394325, Chr6 position 3887581, Chr6 position 7236568, Chr6 position 7728692, Chr6 position 34203617, Chr6 position 37751320, Chr6 position 41410682, Chr6 position 41438516, Chr6 position 41438575, Chr6 position 43464150, Chr6 position 158734279, Chr7 position 989235, Chr7 position 2673543, Chr7 position 73508602, Chr7 position 105079565, Chr7 position 105079631, Chr7 position 151425103, Chr7 position 151425104, Chr8 position 11764017, Chr8 position 21647308, Chr8 position 22548399, Chr8 position 22548483, Chr8 position 133570537, Chr8 position 141320393, Chr8 position 141320410, Chr9 position 6566568, Chr9 position 16197862, Chr9 position 34591313, Chr9 position 98225096, Chr9 position 126126741, Chr9 position 132083428, Chr9 position 136077410, Chr9 position 139655018, Chr9 position 140205985, Chr9 position 140205985, Chr9 position 140205997, Chr10 position 3929071, Chr10 position 30047012, Chr10 position 79702989, Chr10 position 87984905, Chr10 position 94838789, Chr10 position 102131187, Chr10 position 104196489, Chr10 position 111766879, Chr10 position 112258886, Chr10 position 112258984, Chr10 position 112259015, Chr10 position 116391763, Chr10 position 120011530, Chr10 position 126172714, Chr10 position 126172747, Chr11 position 556355, Chr11 position 821282, Chr11 position 12188937, Chr11 position 12188948, Chr11 position 12188995, Chr11 position 36057726, Chr11 position 48070143, Chr11 position 48070163, Chr11 position 48070166, Chr11 position 48070174, Chr11 position 65158294, Chr11 position 65158342, Chr11 position 65297089, Chr11 position 66104481, Chr11 position 66104485, Chr11 position 66104578, Chr11 position 68608767, Chr11 position 70236292, Chr11 position 70236320, Chr11 position 70236331, Chr1l position 115530032, Chr1l position 117950310, Chr1l position 117950329, Chr1l position 117950361, Chr1l position 117950362, Chr1l position 119293593, Chr12 position 679803, Chr12 position 26039132, Chr12 position 31004558, Chr12 position 45610695, Chr12 position 45610701, Chr12 position 45610702, Chr12 position 45610706, Chr12 position 50286016, Chr12 position 52243258, Chr12 position 52243286, Chr12 position 54145732, Chr12 position 54145741, Chr12 position 54145825, Chr12 position 56115043, Chr12 position 66262229, Chr12 position 66262230, Chr12 position 66262233, Chr12 position 66262234, Chr12 position 77266621, Chr12 position 117580102, Chr12 position 123435962, Chr12 position 123436011, Chr12 position 123436065, Chr12 position 123540893, Chr13 position 20735797, Chr13 position 23500419, Chr13 position 46771519, Chr13 position 46771520, Chr13 position 53313426, Chr13 position 113807393, Chr14 position 38599118, Chr14 position 69170010, Chr14 position 75701632, Chr14 position 75701643, Chr14 position 90850454, Chr14 position 97524282, Chr14 position 103541602, Chr14 position 103768055, Chr14 position 104209000, Chr14 position 104209068, Chr14 position 104354645, Chr14 position 104360487, Chr15 position 41068807, Chr15 position 61152225, Chr15 position 61152253, Chr15 position 61152313, Chr15 position 65186440, Chr15 position 68851629, Chr15 position 70667596, Chr15 position 70767206, Chr15 position 75251486, Chr15 position 77984014, Chr15 position 77989064, Chr15 position 83952081, Chr15 position 85402496, Chr15 position 85402497, Chr15 position 99417337, Chr16 position 1231873, Chr16 position 1458639, Chr16 position 3023231, Chr16 position 23135832, Chr16 position 29616265, Chr16 position 31009547, Chr16 position 31009548, Chr16 position 31009590, Chr16 position 57793674, Chr16 position 57793715, Chr16 position 57793727, Chr16 position 70771056, Chr16 position 70771079, Chr16 position 70771141, Chr16 position 77332010, Chr16 position 78540378, Chr16 position 79333435, Chr16 position 84262419, Chr16 position 88701114, Chr16 position 89988308, Chr16 position 89988644, Chr17 position 1509928, Chr17 position 1509945, Chr17 position 1509952, Chr17 position 1509953, Chr17 position 7644013, Chr17 position 16323460, Chr17 position 16323473, Chr17 position 16924561, Chr17 position 16924562, Chr17 position 16924594, Chr17 position 17717918, Chr17 position 17718591, Chr17 position 18139506, Chr17 position 35278031, Chr17 position 39677570, Chr17 position 40826257, Chr17 position 43037426, Chr17 position 43200096, Chr17 position 43200239, Chr17 position 43510142, Chr17 position 47987828, Chr17 position 48178379, Chr17 position 48596391, Chr17 position 48764165, Chr17 position 55701962, Chr17 position 73584599, Chr17 position 73993165, Chr17 position 75827716, Chr17 position 76882243, Chr17 position 78765910, Chr17 position 79544478, Chr17 position 80696474, Chr18 position 19751759, Chr18 position 21440760, Chr18 position 45555437, Chr18 position 45555438, Chr18 position 46547891, Chr18 position 55888885, Chr18 position 56452096, Chr18 position 56452476, Chr18 position 56887181, Chr18 position 76002973, Chr18 position 77331090, Chr19 position 677895, Chr19 position 884044, Chr19 position 884059, Chr19 position 884105, Chr19 position 884115, Chr19 position 1136511, Chr19 position 1177605, Chr19 position 1177612, Chr19 position 1177640, Chr19 position 1860601, Chr19 position 1860607, Chr19 position 2503954, Chr19 position 3434917, Chr19 position 3434921, Chr19 position 3434930, Chr19 position 3434939, Chr19 position 3434952, Chr19 position 3434954, Chr19 position 3434962, Chr19 position 3434964, Chr19 position 3434979, Chr19 position 3434985, Chr19 position 4052713, Chr19 position 4052714, Chr19 position 4052749, Chr19 position 4374591, Chr19 position 5013982, Chr19 position 5048836, Chr19 position 5048867, Chr19 position 5048877, Chr19 position 8367279, Chr19 position 8428573, Chr19 position 10254577, Chr19 position 10254578, Chr19 position 10463956, Chr19 position 10464137, Chr19 position 13203671, Chr19 position 13266925, Chr19 position 13266934, Chr19 position 13266970, Chr19 position 13842142, Chr19 position 14248494, Chr19 position 15375465, Chr19 position 17218912, Chr19 position 17346702, Chr19 position 17346702, Chr19 position 18157161, Chr19 position 18157221, Chr19 position 18157258, Chr19 position 18415877, Chr19 position 18415890, Chr19 position 30606642, Chr19 position 35531842, Chr19 position 44303112, Chr19 position 47173037, Chr19 position 47316268, Chr19 position 47778278, Chr19 position 47778298, Chr20 position 34206950, Chr20 position 36771969, Chr20 position 48993661, Chr20 position 58406398, Chr20 position 61976049, Chr20 position 61976073, Chr20 position 62588571, Chr20 position 62588579, Chr22 position 19738127, Chr22 position 35965176, Chr22 position 36549809, Chr22 position 36973375, Chr22 position 37447953, Chr22 position 37914998, Chr22 position 38307317, Chr22 position 39662794, and Chr22 position 45622980.

[0072] In embodiments, the method includes detecting methylation or unmethylation of at least 100 of the following sites: Chr1 position 2996653, Chr1 position 11979164, Chr1 position 12655938, Chr1 position 16450525, Chr1 position 16450542, Chr1 position 16450545, Chr1 position 16469987, Chr1 position 17494491, Chr1 position 25473203, Chr1 position 27640460, Chr1 position 29565080, Chr1 position 38493013, Chr1 position 38493030, Chr1 position 38493074, Chr1 position 46713777, Chr1 position 46914121, Chr1 position 46955744, Chr1 position 55008344, Chr1 position 109816092, Chr1 position 109816111, Chr1 position 110074669, Chr1 position 110074681, Chr1 position 110074685, Chr1 position 150949856, Chr1 position 150949857, Chr1 position 153540282, Chr1 position 155162704, Chr1 position 155162714, Chr1 position 156676611, Chr1 position 157611881, Chr1 position 182205324, Chr1 position 204118999, Chr1 position 206741875, Chr1 position 206741989, Chr1 position 212587673, Chr1 position 212841198, Chr1 position 223403952, Chr1 position 233430972, Chr1 position 234342767, Chr2 position 3454277, Chr2 position 8793724, Chr2 position 20412441, Chr2 position 42329402, Chr2 position 42329494, Chr2 position 55289272, Chr2 position 65064865, Chr2 position 70823641, Chr2 position 73143689, Chr2 position 74454110, Chr2 position 122014529, Chr2 position 128158884, Chr2 position 128158910, Chr2 position 203114171, Chr2 position 218221671, Chr2 position 219745335, Chr2 position 238341465, Chr2 position 238341542, Chr2 position 238341546, Chr2 position 238774763, Chr3 position 13323642, Chr3 position 14180153, Chr3 position 45209073, Chr3 position 45209207, Chr3 position 52525100, Chr3 position 62589658, Chr3 position 65388317, Chr3 position 65388388, Chr3 position 73599302, Chr3 position 195636893, Chr3 position 197093846, Chr4 position 3743223, Chr4 position 5755716, Chr4 position 5755717, Chr4 position 5755728, Chr4 position 5755729, Chr4 position 5755734, Chr4 position 8372861, Chr4 position 57548289, Chr5 position 1118280, Chr5 position 34564389, Chr5 position 73871907, Chr5 position 78013596, Chr5 position 78013643, Chr5 position 137802650, Chr5 position 139051189, Chr5 position 167838221, Chr5 position 177541401, Chr5 position 180018672, Chr5 position 180101026, Chr6 position 3394325, Chr6 position 3887581, Chr6 position 7236568, Chr6 position 7728692, Chr6 position 34203617, Chr6 position 37751320, Chr6 position 41410682, Chr6 position 41438516, Chr6 position 41438575, Chr6 position 43464150, Chr6 position 158734279, Chr7 position 989235, Chr7 position 2673543, Chr7 position 73508602, Chr7 position 105079565, Chr7 position 105079631, Chr7 position 151425103, Chr7 position 151425104, Chr8 position 11764017, Chr8 position 21647308, Chr8 position 22548399, Chr8 position 22548483, Chr8 position 133570537, Chr8 position 141320393, Chr8 position 141320410, Chr9 position 6566568, Chr9 position 16197862, Chr9 position 34591313, Chr9 position 98225096, Chr9 position 126126741, Chr9 position 132083428, Chr9 position 136077410, Chr9 position 139655018, Chr9 position 140205985, Chr9 position 140205985, Chr9 position 140205997, Chr10 position 3929071, Chr10 position 30047012, Chr10 position 79702989, Chr10 position 87984905, Chr10 position 94838789, Chr10 position 102131187, Chr10 position 104196489, Chr10 position 111766879, Chr10 position 112258886, Chr10 position 112258984, Chr10 position 112259015, Chr10 position 116391763, Chr10 position 120011530, Chr10 position 126172714, Chr10 position 126172747, Chr11 position 556355, Chr11 position 821282, Chr11 position 12188937, Chr11 position 12188948, Chr11 position 12188995, Chr11 position 36057726, Chr11 position 48070143, Chr11 position 48070163, Chr11 position 48070166, Chr11 position 48070174, Chr11 position 65158294, Chr11 position 65158342, Chr11 position 65297089, Chr11 position 66104481, Chr11 position 66104485, Chr11 position 66104578, Chr11 position 68608767, Chr11 position 70236292, Chr11 position 70236320, Chr11 position 70236331, Chr1l position 115530032, Chr1l position 117950310, Chr1l position 117950329, Chr1l position 117950361, Chr1l position 117950362, Chr1l position 119293593, Chr12 position 679803, Chr12 position 26039132, Chr12 position 31004558, Chr12 position 45610695, Chr12 position 45610701, Chr12 position 45610702, Chr12 position 45610706, Chr12 position 50286016, Chr12 position 52243258, Chr12 position 52243286, Chr12 position 54145732, Chr12 position 54145741, Chr12 position 54145825, Chr12 position 56115043, Chr12 position 66262229, Chr12 position 66262230, Chr12 position 66262233, Chr12 position 66262234, Chr12 position 77266621, Chr12 position 117580102, Chr12 position 123435962, Chr12 position 123436011, Chr12 position 123436065, Chr12 position 123540893, Chr13 position 20735797, Chr13 position 23500419, Chr13 position 46771519, Chr13 position 46771520, Chr13 position 53313426, Chr13 position 113807393, Chr14 position 38599118, Chr14 position 69170010, Chr14 position 75701632, Chr14 position 75701643, Chr14 position 90850454, Chr14 position 97524282, Chr14 position 103541602, Chr14 position 103768055, Chr14 position 104209000, Chr14 position 104209068, Chr14 position 104354645, Chr14 position 104360487, Chr15 position 41068807, Chr15 position 61152225, Chr15 position 61152253, Chr15 position 61152313, Chr15 position 65186440, Chr15 position 68851629, Chr15 position 70667596, Chr15 position 70767206, Chr15 position 75251486, Chr15 position 77984014, Chr15 position 77989064, Chr15 position 83952081, Chr15 position 85402496, Chr15 position 85402497, Chr15 position 99417337, Chr16 position 1231873, Chr16 position 1458639, Chr16 position 3023231, Chr16 position 23135832, Chr16 position 29616265, Chr16 position 31009547, Chr16 position 31009548, Chr16 position 31009590, Chr16 position 57793674, Chr16 position 57793715, Chr16 position 57793727, Chr16 position 70771056, Chr16 position 70771079, Chr16 position 70771141, Chr16 position 77332010, Chr16 position 78540378, Chr16 position 79333435, Chr16 position 84262419, Chr16 position 88701114, Chr16 position 89988308, Chr16 position 89988644, Chr17 position 1509928, Chr17 position 1509945, Chr17 position 1509952, Chr17 position 1509953, Chr17 position 7644013, Chr17 position 16323460, Chr17 position 16323473, Chr17 position 16924561, Chr17 position 16924562, Chr17 position 16924594, Chr17 position 17717918, Chr17 position 17718591, Chr17 position 18139506, Chr17 position 35278031, Chr17 position 39677570, Chr17 position 40826257, Chr17 position 43037426, Chr17 position 43200096, Chr17 position 43200239, Chr17 position 43510142, Chr17 position 47987828, Chr17 position 48178379, Chr17 position 48596391, Chr17 position 48764165, Chr17 position 55701962, Chr17 position 73584599, Chr17 position 73993165, Chr17 position 75827716, Chr17 position 76882243, Chr17 position 78765910, Chr17 position 79544478, Chr17 position 80696474, Chr18 position 19751759, Chr18 position 21440760, Chr18 position 45555437, Chr18 position 45555438, Chr18 position 46547891, Chr18 position 55888885, Chr18 position 56452096, Chr18 position 56452476, Chr18 position 56887181, Chr18 position 76002973, Chr18 position 77331090, Chr19 position 677895, Chr19 position 884044, Chr19 position 884059, Chr19 position 884105, Chr19 position 884115, Chr19 position 1136511, Chr19 position 1177605, Chr19 position 1177612, Chr19 position 1177640, Chr19 position 1860601, Chr19 position 1860607, Chr19 position 2503954, Chr19 position 3434917, Chr19 position 3434921, Chr19 position 3434930, Chr19 position 3434939, Chr19 position 3434952, Chr19 position 3434954, Chr19 position 3434962, Chr19 position 3434964, Chr19 position 3434979, Chr19 position 3434985, Chr19 position 4052713, Chr19 position 4052714, Chr19 position 4052749, Chr19 position 4374591, Chr19 position 5013982, Chr19 position 5048836, Chr19 position 5048867, Chr19 position 5048877, Chr19 position 8367279, Chr19 position 8428573, Chr19 position 10254577, Chr19 position 10254578, Chr19 position 10463956, Chr19 position 10464137, Chr19 position 13203671, Chr19 position 13266925, Chr19 position 13266934, Chr19 position 13266970, Chr19 position 13842142, Chr19 position 14248494, Chr19 position 15375465, Chr19 position 17218912, Chr19 position 17346702, Chr19 position 17346702, Chr19 position 18157161, Chr19 position 18157221, Chr19 position 18157258, Chr19 position 18415877, Chr19 position 18415890, Chr19 position 30606642, Chr19 position 35531842, Chr19 position 44303112, Chr19 position 47173037, Chr19 position 47316268, Chr19 position 47778278, Chr19 position 47778298, Chr20 position 34206950, Chr20 position 36771969, Chr20 position 48993661, Chr20 position 58406398, Chr20 position 61976049, Chr20 position 61976073, Chr20 position 62588571, Chr20 position 62588579, Chr22 position 19738127, Chr22 position 35965176, Chr22 position 36549809, Chr22 position 36973375, Chr22 position 37447953, Chr22 position 37914998, Chr22 position 38307317, Chr22 position 39662794, and Chr22 position 45622980.

[0073] In embodiments, the method includes detecting methylation or unmethylation of at least 200 of the following sites: Chr1 position 2996653, Chr1 position 11979164, Chr1 position 12655938, Chr1 position 16450525, Chr1 position 16450542, Chr1 position 16450545, Chr1 position 16469987, Chr1 position 17494491, Chr1 position 25473203, Chr1 position 27640460, Chr1 position 29565080, Chr1 position 38493013, Chr1 position 38493030, Chr1 position 38493074, Chr1 position 46713777, Chr1 position 46914121, Chr1 position 46955744, Chr1 position 55008344, Chr1 position 109816092, Chr1 position 109816111, Chr1 position 110074669, Chr1 position 110074681, Chr1 position 110074685, Chr1 position 150949856, Chr1 position 150949857, Chr1 position 153540282, Chr1 position 155162704, Chr1 position 155162714, Chr1 position 156676611, Chr1 position 157611881, Chr1 position 182205324, Chr1 position 204118999, Chr1 position 206741875, Chr1 position 206741989, Chr1 position 212587673, Chr1 position 212841198, Chr1 position 223403952, Chr1 position 233430972, Chr1 position 234342767, Chr2 position 3454277, Chr2 position 8793724, Chr2 position 20412441, Chr2 position 42329402, Chr2 position 42329494, Chr2 position 55289272, Chr2 position 65064865, Chr2 position 70823641, Chr2 position 73143689, Chr2 position 74454110, Chr2 position 122014529, Chr2 position 128158884, Chr2 position 128158910, Chr2 position 203114171, Chr2 position 218221671, Chr2 position 219745335, Chr2 position 238341465, Chr2 position 238341542, Chr2 position 238341546, Chr2 position 238774763, Chr3 position 13323642, Chr3 position 14180153, Chr3 position 45209073, Chr3 position 45209207, Chr3 position 52525100, Chr3 position 62589658, Chr3 position 65388317, Chr3 position 65388388, Chr3 position 73599302, Chr3 position 195636893, Chr3 position 197093846, Chr4 position 3743223, Chr4 position 5755716, Chr4 position 5755717, Chr4 position 5755728, Chr4 position 5755729, Chr4 position 5755734, Chr4 position 8372861, Chr4 position 57548289, Chr5 position 1118280, Chr5 position 34564389, Chr5 position 73871907, Chr5 position 78013596, Chr5 position 78013643, Chr5 position 137802650, Chr5 position 139051189, Chr5 position 167838221, Chr5 position 177541401, Chr5 position 180018672, Chr5 position 180101026, Chr6 position 3394325, Chr6 position 3887581, Chr6 position 7236568, Chr6 position 7728692, Chr6 position 34203617, Chr6 position 37751320, Chr6 position 41410682, Chr6 position 41438516, Chr6 position 41438575, Chr6 position 43464150, Chr6 position 158734279, Chr7 position 989235, Chr7 position 2673543, Chr7 position 73508602, Chr7 position 105079565, Chr7 position 105079631, Chr7 position 151425103, Chr7 position 151425104, Chr8 position 11764017, Chr8 position 21647308, Chr8 position 22548399, Chr8 position 22548483, Chr8 position 133570537, Chr8 position 141320393, Chr8 position 141320410, Chr9 position 6566568, Chr9 position 16197862, Chr9 position 34591313, Chr9 position 98225096, Chr9 position 126126741, Chr9 position 132083428, Chr9 position 136077410, Chr9 position 139655018, Chr9 position 140205985, Chr9 position 140205985, Chr9 position 140205997, Chr10 position 3929071, Chr10 position 30047012, Chr10 position 79702989, Chr10 position 87984905, Chr10 position 94838789, Chr10 position 102131187, Chr10 position 104196489, Chr10 position 111766879, Chr10 position 112258886, Chr10 position 112258984, Chr10 position 112259015, Chr10 position 116391763, Chr10 position 120011530, Chr10 position 126172714, Chr10 position 126172747, Chr11 position 556355, Chr11 position 821282, Chr11 position 12188937, Chr11 position 12188948, Chr11 position 12188995, Chr11 position 36057726, Chr11 position 48070143, Chr11 position 48070163, Chr11 position 48070166, Chr11 position 48070174, Chr11 position 65158294, Chr11 position 65158342, Chr11 position 65297089, Chr11 position 66104481, Chr11 position 66104485, Chr11 position 66104578, Chr11 position 68608767, Chr11 position 70236292, Chr11 position 70236320, Chr11 position 70236331, Chr1l position 115530032, Chr1l position 117950310, Chr1l position 117950329, Chr1l position 117950361, Chr1l position 117950362, Chr1l position 119293593, Chr12 position 679803, Chr12 position 26039132, Chr12 position 31004558, Chr12 position 45610695, Chr12 position 45610701, Chr12 position 45610702, Chr12 position 45610706, Chr12 position 50286016, Chr12 position 52243258, Chr12 position 52243286, Chr12 position 54145732, Chr12 position 54145741, Chr12 position 54145825, Chr12 position 56115043, Chr12 position 66262229, Chr12 position 66262230, Chr12 position 66262233, Chr12 position 66262234, Chr12 position 77266621, Chr12 position 117580102, Chr12 position 123435962, Chr12 position 123436011, Chr12 position 123436065, Chr12 position 123540893, Chr13 position 20735797, Chr13 position 23500419, Chr13 position 46771519, Chr13 position 46771520, Chr13 position 53313426, Chr13 position 113807393, Chr14 position 38599118, Chr14 position 69170010, Chr14 position 75701632, Chr14 position 75701643, Chr14 position 90850454, Chr14 position 97524282, Chr14 position 103541602, Chr14 position 103768055, Chr14 position 104209000, Chr14 position 104209068, Chr14 position 104354645, Chr14 position 104360487, Chr15 position 41068807, Chr15 position 61152225, Chr15 position 61152253, Chr15 position 61152313, Chr15 position 65186440, Chr15 position 68851629, Chr15 position 70667596, Chr15 position 70767206, Chr15 position 75251486, Chr15 position 77984014, Chr15 position 77989064, Chr15 position 83952081, Chr15 position 85402496, Chr15 position 85402497, Chr15 position 99417337, Chr16 position 1231873, Chr16 position 1458639, Chr16 position 3023231, Chr16 position 23135832, Chr16 position 29616265, Chr16 position 31009547, Chr16 position 31009548, Chr16 position 31009590, Chr16 position 57793674, Chr16 position 57793715, Chr16 position 57793727, Chr16 position 70771056, Chr16 position 70771079, Chr16 position 70771141, Chr16 position 77332010, Chr16 position 78540378, Chr16 position 79333435, Chr16 position 84262419, Chr16 position 88701114, Chr16 position 89988308, Chr16 position 89988644, Chr17 position 1509928, Chr17 position 1509945, Chr17 position 1509952, Chr17 position 1509953, Chr17 position 7644013, Chr17 position 16323460, Chr17 position 16323473, Chr17 position 16924561, Chr17 position 16924562, Chr17 position 16924594, Chr17 position 17717918, Chr17 position 17718591, Chr17 position 18139506, Chr17 position 35278031, Chr17 position 39677570, Chr17 position 40826257, Chr17 position 43037426, Chr17 position 43200096, Chr17 position 43200239, Chr17 position 43510142, Chr17 position 47987828, Chr17 position 48178379, Chr17 position 48596391, Chr17 position 48764165, Chr17 position 55701962, Chr17 position 73584599, Chr17 position 73993165, Chr17 position 75827716, Chr17 position 76882243, Chr17 position 78765910, Chr17 position 79544478, Chr17 position 80696474, Chr18 position 19751759, Chr18 position 21440760, Chr18 position 45555437, Chr18 position 45555438, Chr18 position 46547891, Chr18 position 55888885, Chr18 position 56452096, Chr18 position 56452476, Chr18 position 56887181, Chr18 position 76002973, Chr18 position 77331090, Chr19 position 677895, Chr19 position 884044, Chr19 position 884059, Chr19 position 884105, Chr19 position 884115, Chr19 position 1136511, Chr19 position 1177605, Chr19 position 1177612, Chr19 position 1177640, Chr19 position 1860601, Chr19 position 1860607, Chr19 position 2503954, Chr19 position 3434917, Chr19 position 3434921, Chr19 position 3434930, Chr19 position 3434939, Chr19 position 3434952, Chr19 position 3434954, Chr19 position 3434962, Chr19 position 3434964, Chr19 position 3434979, Chr19 position 3434985, Chr19 position 4052713, Chr19 position 4052714, Chr19 position 4052749, Chr19 position 4374591, Chr19 position 5013982, Chr19 position 5048836, Chr19 position 5048867, Chr19 position 5048877, Chr19 position 8367279, Chr19 position 8428573, Chr19 position 10254577, Chr19 position 10254578, Chr19 position 10463956, Chr19 position 10464137, Chr19 position 13203671, Chr19 position 13266925, Chr19 position 13266934, Chr19 position 13266970, Chr19 position 13842142, Chr19 position 14248494, Chr19 position 15375465, Chr19 position 17218912, Chr19 position 17346702, Chr19 position 17346702, Chr19 position 18157161, Chr19 position 18157221, Chr19 position 18157258, Chr19 position 18415877, Chr19 position 18415890, Chr19 position 30606642, Chr19 position 35531842, Chr19 position 44303112, Chr19 position 47173037, Chr19 position 47316268, Chr19 position 47778278, Chr19 position 47778298, Chr20 position 34206950, Chr20 position 36771969, Chr20 position 48993661, Chr20 position 58406398, Chr20 position 61976049, Chr20 position 61976073, Chr20 position 62588571, Chr20 position 62588579, Chr22 position 19738127, Chr22 position 35965176, Chr22 position 36549809, Chr22 position 36973375, Chr22 position 37447953, Chr22 position 37914998, Chr22 position 38307317, Chr22 position 39662794, and Chr22 position 45622980.

[0074] In embodiments, the method includes detecting methylation or unmethylation of at least 300 of the following sites: Chr1 position 2996653, Chr1 position 11979164, Chr1 position 12655938, Chr1 position 16450525, Chr1 position 16450542, Chr1 position 16450545, Chr1 position 16469987, Chr1 position 17494491, Chr1 position 25473203, Chr1 position 27640460, Chr1 position 29565080, Chr1 position 38493013, Chr1 position 38493030, Chr1 position 38493074, Chr1 position 46713777, Chr1 position 46914121, Chr1 position 46955744, Chr1 position 55008344, Chr1 position 109816092, Chr1 position 109816111, Chr1 position 110074669, Chr1 position 110074681, Chr1 position 110074685, Chr1 position 150949856, Chr1 position 150949857, Chr1 position 153540282, Chr1 position 155162704, Chr1 position 155162714, Chr1 position 156676611, Chr1 position 157611881, Chr1 position 182205324, Chr1 position 204118999, Chr1 position 206741875, Chr1 position 206741989, Chr1 position 212587673, Chr1 position 212841198, Chr1 position 223403952, Chr1 position 233430972, Chr1 position 234342767, Chr2 position 3454277, Chr2 position 8793724, Chr2 position 20412441, Chr2 position 42329402, Chr2 position 42329494, Chr2 position 55289272, Chr2 position 65064865, Chr2 position 70823641, Chr2 position 73143689, Chr2 position 74454110, Chr2 position 122014529, Chr2 position 128158884, Chr2 position 128158910, Chr2 position 203114171, Chr2 position 218221671, Chr2 position 219745335, Chr2 position 238341465, Chr2 position 238341542, Chr2 position 238341546, Chr2 position 238774763, Chr3 position 13323642, Chr3 position 14180153, Chr3 position 45209073, Chr3 position 45209207, Chr3 position 52525100, Chr3 position 62589658, Chr3 position 65388317, Chr3 position 65388388, Chr3 position 73599302, Chr3 position 195636893, Chr3 position 197093846, Chr4 position 3743223, Chr4 position 5755716, Chr4 position 5755717, Chr4 position 5755728, Chr4 position 5755729, Chr4 position 5755734, Chr4 position 8372861, Chr4 position 57548289, Chr5 position 1118280, Chr5 position 34564389, Chr5 position 73871907, Chr5 position 78013596, Chr5 position 78013643, Chr5 position 137802650, Chr5 position 139051189, Chr5 position 167838221, Chr5 position 177541401, Chr5 position 180018672, Chr5 position 180101026, Chr6 position 3394325, Chr6 position 3887581, Chr6 position 7236568, Chr6 position 7728692, Chr6 position 34203617, Chr6 position 37751320, Chr6 position 41410682, Chr6 position 41438516, Chr6 position 41438575, Chr6 position 43464150, Chr6 position 158734279, Chr7 position 989235, Chr7 position 2673543, Chr7 position 73508602, Chr7 position 105079565, Chr7 position 105079631, Chr7 position 151425103, Chr7 position 151425104, Chr8 position 11764017, Chr8 position 21647308, Chr8 position 22548399, Chr8 position 22548483, Chr8 position 133570537, Chr8 position 141320393, Chr8 position 141320410, Chr9 position 6566568, Chr9 position 16197862, Chr9 position 34591313, Chr9 position 98225096, Chr9 position 126126741, Chr9 position 132083428, Chr9 position 136077410, Chr9 position 139655018, Chr9 position 140205985, Chr9 position 140205985, Chr9 position 140205997, Chr10 position 3929071, Chr10 position 30047012, Chr10 position 79702989, Chr10 position 87984905, Chr10 position 94838789, Chr10 position 102131187, Chr10 position 104196489, Chr10 position 111766879, Chr10 position 112258886, Chr10 position 112258984, Chr10 position 112259015, Chr10 position 116391763, Chr10 position 120011530, Chr10 position 126172714, Chr10 position 126172747, Chr11 position 556355, Chr11 position 821282, Chr11 position 12188937, Chr11 position 12188948, Chr11 position 12188995, Chr11 position 36057726, Chr11 position 48070143, Chr11 position 48070163, Chr11 position 48070166, Chr11 position 48070174, Chr11 position 65158294, Chr11 position 65158342, Chr11 position 65297089, Chr11 position 66104481, Chr11 position 66104485, Chr11 position 66104578, Chr11 position 68608767, Chr11 position 70236292, Chr11 position 70236320, Chr11 position 70236331, Chr1l position 115530032, Chr1l position 117950310, Chr1l position 117950329, Chr1l position 117950361, Chr1l position 117950362, Chr1l position 119293593, Chr12 position 679803, Chr12 position 26039132, Chr12 position 31004558, Chr12 position 45610695, Chr12 position 45610701, Chr12 position 45610702, Chr12 position 45610706, Chr12 position 50286016, Chr12 position 52243258, Chr12 position 52243286, Chr12 position 54145732, Chr12 position 54145741, Chr12 position 54145825, Chr12 position 56115043, Chr12 position 66262229, Chr12 position 66262230, Chr12 position 66262233, Chr12 position 66262234, Chr12 position 77266621, Chr12 position 117580102, Chr12 position 123435962, Chr12 position 123436011, Chr12 position 123436065, Chr12 position 123540893, Chr13 position 20735797, Chr13 position 23500419, Chr13 position 46771519, Chr13 position 46771520, Chr13 position 53313426, Chr13 position 113807393, Chr14 position 38599118, Chr14 position 69170010, Chr14 position 75701632, Chr14 position 75701643, Chr14 position 90850454, Chr14 position 97524282, Chr14 position 103541602, Chr14 position 103768055, Chr14 position 104209000, Chr14 position 104209068, Chr14 position 104354645, Chr14 position 104360487, Chr15 position 41068807, Chr15 position 61152225, Chr15 position 61152253, Chr15 position 61152313, Chr15 position 65186440, Chr15 position 68851629, Chr15 position 70667596, Chr15 position 70767206, Chr15 position 75251486, Chr15 position 77984014, Chr15 position 77989064, Chr15 position 83952081, Chr15 position 85402496, Chr15 position 85402497, Chr15 position 99417337, Chr16 position 1231873, Chr16 position 1458639, Chr16 position 3023231, Chr16 position 23135832, Chr16 position 29616265, Chr16 position 31009547, Chr16 position 31009548, Chr16 position 31009590, Chr16 position 57793674, Chr16 position 57793715, Chr16 position 57793727, Chr16 position 70771056, Chr16 position 70771079, Chr16 position 70771141, Chr16 position 77332010, Chr16 position 78540378, Chr16 position 79333435, Chr16 position 84262419, Chr16 position 88701114, Chr16 position 89988308, Chr16 position 89988644, Chr17 position 1509928, Chr17 position 1509945, Chr17 position 1509952, Chr17 position 1509953, Chr17 position 7644013, Chr17 position 16323460, Chr17 position 16323473, Chr17 position 16924561, Chr17 position 16924562, Chr17 position 16924594, Chr17 position 17717918, Chr17 position 17718591, Chr17 position 18139506, Chr17 position 35278031, Chr17 position 39677570, Chr17 position 40826257, Chr17 position 43037426, Chr17 position 43200096, Chr17 position 43200239, Chr17 position 43510142, Chr17 position 47987828, Chr17 position 48178379, Chr17 position 48596391, Chr17 position 48764165, Chr17 position 55701962, Chr17 position 73584599, Chr17 position 73993165, Chr17 position 75827716, Chr17 position 76882243, Chr17 position 78765910, Chr17 position 79544478, Chr17 position 80696474, Chr18 position 19751759, Chr18 position 21440760, Chr18 position 45555437, Chr18 position 45555438, Chr18 position 46547891, Chr18 position 55888885, Chr18 position 56452096, Chr18 position 56452476, Chr18 position 56887181, Chr18 position 76002973, Chr18 position 77331090, Chr19 position 677895, Chr19 position 884044, Chr19 position 884059, Chr19 position 884105, Chr19 position 884115, Chr19 position 1136511, Chr19 position 1177605, Chr19 position 1177612, Chr19 position 1177640, Chr19 position 1860601, Chr19 position 1860607, Chr19 position 2503954, Chr19 position 3434917, Chr19 position 3434921, Chr19 position 3434930, Chr19 position 3434939, Chr19 position 3434952, Chr19 position 3434954, Chr19 position 3434962, Chr19 position 3434964, Chr19 position 3434979, Chr19 position 3434985, Chr19 position 4052713, Chr19 position 4052714, Chr19 position 4052749, Chr19 position 4374591, Chr19 position 5013982, Chr19 position 5048836, Chr19 position 5048867, Chr19 position 5048877, Chr19 position 8367279, Chr19 position 8428573, Chr19 position 10254577, Chr19 position 10254578, Chr19 position 10463956, Chr19 position 10464137, Chr19 position 13203671, Chr19 position 13266925, Chr19 position 13266934, Chr19 position 13266970, Chr19 position 13842142, Chr19 position 14248494, Chr19 position 15375465, Chr19 position 17218912, Chr19 position 17346702, Chr19 position 17346702, Chr19 position 18157161, Chr19 position 18157221, Chr19 position 18157258, Chr19 position 18415877, Chr19 position 18415890, Chr19 position 30606642, Chr19 position 35531842, Chr19 position 44303112, Chr19 position 47173037, Chr19 position 47316268, Chr19 position 47778278, Chr19 position 47778298, Chr20 position 34206950, Chr20 position 36771969, Chr20 position 48993661, Chr20 position 58406398, Chr20 position 61976049, Chr20 position 61976073, Chr20 position 62588571, Chr20 position 62588579, Chr22 position 19738127, Chr22 position 35965176, Chr22 position 36549809, Chr22 position 36973375, Chr22 position 37447953, Chr22 position 37914998, Chr22 position 38307317, Chr22 position 39662794, and Chr22 position 45622980.

[0075] In embodiments, the method includes detecting methylation or unmethylation of at least 400 of the following sites: Chr1 position 2996653, Chr1 position 11979164, Chr1 position 12655938, Chr1 position 16450525, Chr1 position 16450542, Chr1 position 16450545, Chr1 position 16469987, Chr1 position 17494491, Chr1 position 25473203, Chr1 position 27640460, Chr1 position 29565080, Chr1 position 38493013, Chr1 position 38493030, Chr1 position 38493074, Chr1 position 46713777, Chr1 position 46914121, Chr1 position 46955744, Chr1 position 55008344, Chr1 position 109816092, Chr1 position 109816111, Chr1 position 110074669, Chr1 position 110074681, Chr1 position 110074685, Chr1 position 150949856, Chr1 position 150949857, Chr1 position 153540282, Chr1 position 155162704, Chr1 position 155162714, Chr1 position 156676611, Chr1 position 157611881, Chr1 position 182205324, Chr1 position 204118999, Chr1 position 206741875, Chr1 position 206741989, Chr1 position 212587673, Chr1 position 212841198, Chr1 position 223403952, Chr1 position 233430972, Chr1 position 234342767, Chr2 position 3454277, Chr2 position 8793724, Chr2 position 20412441, Chr2 position 42329402, Chr2 position 42329494, Chr2 position 55289272, Chr2 position 65064865, Chr2 position 70823641, Chr2 position 73143689, Chr2 position 74454110, Chr2 position 122014529, Chr2 position 128158884, Chr2 position 128158910, Chr2 position 203114171, Chr2 position 218221671, Chr2 position 219745335, Chr2 position 238341465, Chr2 position 238341542, Chr2 position 238341546, Chr2 position 238774763, Chr3 position 13323642, Chr3 position 14180153, Chr3 position 45209073, Chr3 position 45209207, Chr3 position 52525100, Chr3 position 62589658, Chr3 position 65388317, Chr3 position 65388388, Chr3 position 73599302, Chr3 position 195636893, Chr3 position 197093846, Chr4 position 3743223, Chr4 position 5755716, Chr4 position 5755717, Chr4 position 5755728, Chr4 position 5755729, Chr4 position 5755734, Chr4 position 8372861, Chr4 position 57548289, Chr5 position 1118280, Chr5 position 34564389, Chr5 position 73871907, Chr5 position 78013596, Chr5 position 78013643, Chr5 position 137802650, Chr5 position 139051189, Chr5 position 167838221, Chr5 position 177541401, Chr5 position 180018672, Chr5 position 180101026, Chr6 position 3394325, Chr6 position 3887581, Chr6 position 7236568, Chr6 position 7728692, Chr6 position 34203617, Chr6 position 37751320, Chr6 position 41410682, Chr6 position 41438516, Chr6 position 41438575, Chr6 position 43464150, Chr6 position 158734279, Chr7 position 989235, Chr7 position 2673543, Chr7 position 73508602, Chr7 position 105079565, Chr7 position 105079631, Chr7 position 151425103, Chr7 position 151425104, Chr8 position 11764017, Chr8 position 21647308, Chr8 position 22548399, Chr8 position 22548483, Chr8 position 133570537, Chr8 position 141320393, Chr8 position 141320410, Chr9 position 6566568, Chr9 position 16197862, Chr9 position 34591313, Chr9 position 98225096, Chr9 position 126126741, Chr9 position 132083428, Chr9 position 136077410, Chr9 position 139655018, Chr9 position 140205985, Chr9 position 140205985, Chr9 position 140205997, Chr10 position 3929071, Chr10 position 30047012, Chr10 position 79702989, Chr10 position 87984905, Chr10 position 94838789, Chr10 position 102131187, Chr10 position 104196489, Chr10 position 111766879, Chr10 position 112258886, Chr10 position 112258984, Chr10 position 112259015, Chr10 position 116391763, Chr10 position 120011530, Chr10 position 126172714, Chr10 position 126172747, Chr11 position 556355, Chr11 position 821282, Chr11 position 12188937, Chr11 position 12188948, Chr11 position 12188995, Chr11 position 36057726, Chr11 position 48070143, Chr11 position 48070163, Chr11 position 48070166, Chr11 position 48070174, Chr11 position 65158294, Chr11 position 65158342, Chr11 position 65297089, Chr11 position 66104481, Chr11 position 66104485, Chr11 position 66104578, Chr11 position 68608767, Chr11 position 70236292, Chr11 position 70236320, Chr11 position 70236331, Chr1l position 115530032, Chr1l position 117950310, Chr1l position 117950329, Chr1l position 117950361, Chr1l position 117950362, Chr1l position 119293593, Chr12 position 679803, Chr12 position 26039132, Chr12 position 31004558, Chr12 position 45610695, Chr12 position 45610701, Chr12 position 45610702, Chr12 position 45610706, Chr12 position 50286016, Chr12 position 52243258, Chr12 position 52243286, Chr12 position 54145732, Chr12 position 54145741, Chr12 position 54145825, Chr12 position 56115043, Chr12 position 66262229, Chr12 position 66262230, Chr12 position 66262233, Chr12 position 66262234, Chr12 position 77266621, Chr12 position 117580102, Chr12 position 123435962, Chr12 position 123436011, Chr12 position 123436065, Chr12 position 123540893, Chr13 position 20735797, Chr13 position 23500419, Chr13 position 46771519, Chr13 position 46771520, Chr13 position 53313426, Chr13 position 113807393, Chr14 position 38599118, Chr14 position 69170010, Chr14 position 75701632, Chr14 position 75701643, Chr14 position 90850454, Chr14 position 97524282, Chr14 position 103541602, Chr14 position 103768055, Chr14 position 104209000, Chr14 position 104209068, Chr14 position 104354645, Chr14 position 104360487, Chr15 position 41068807, Chr15 position 61152225, Chr15 position 61152253, Chr15 position 61152313, Chr15 position 65186440, Chr15 position 68851629, Chr15 position 70667596, Chr15 position 70767206, Chr15 position 75251486, Chr15 position 77984014, Chr15 position 77989064, Chr15 position 83952081, Chr15 position 85402496, Chr15 position 85402497, Chr15 position 99417337, Chr16 position 1231873, Chr16 position 1458639, Chr16 position 3023231, Chr16 position 23135832, Chr16 position 29616265, Chr16 position 31009547, Chr16 position 31009548, Chr16 position 31009590, Chr16 position 57793674, Chr16 position 57793715, Chr16 position 57793727, Chr16 position 70771056, Chr16 position 70771079, Chr16 position 70771141, Chr16 position 77332010, Chr16 position 78540378, Chr16 position 79333435, Chr16 position 84262419, Chr16 position 88701114, Chr16 position 89988308, Chr16 position 89988644, Chr17 position 1509928, Chr17 position 1509945, Chr17 position 1509952, Chr17 position 1509953, Chr17 position 7644013, Chr17 position 16323460, Chr17 position 16323473, Chr17 position 16924561, Chr17 position 16924562, Chr17 position 16924594, Chr17 position 17717918, Chr17 position 17718591, Chr17 position 18139506, Chr17 position 35278031, Chr17 position 39677570, Chr17 position 40826257, Chr17 position 43037426, Chr17 position 43200096, Chr17 position 43200239, Chr17 position 43510142, Chr17 position 47987828, Chr17 position 48178379, Chr17 position 48596391, Chr17 position 48764165, Chr17 position 55701962, Chr17 position 73584599, Chr17 position 73993165, Chr17 position 75827716, Chr17 position 76882243, Chr17 position 78765910, Chr17 position 79544478, Chr17 position 80696474, Chr18 position 19751759, Chr18 position 21440760, Chr18 position 45555437, Chr18 position 45555438, Chr18 position 46547891, Chr18 position 55888885, Chr18 position 56452096, Chr18 position 56452476, Chr18 position 56887181, Chr18 position 76002973, Chr18 position 77331090, Chr19 position 677895, Chr19 position 884044, Chr19 position 884059, Chr19 position 884105, Chr19 position 884115, Chr19 position 1136511, Chr19 position 1177605, Chr19 position 1177612, Chr19 position 1177640, Chr19 position 1860601, Chr19 position 1860607, Chr19 position 2503954, Chr19 position 3434917, Chr19 position 3434921, Chr19 position 3434930, Chr19 position 3434939, Chr19 position 3434952, Chr19 position 3434954, Chr19 position 3434962, Chr19 position 3434964, Chr19 position 3434979, Chr19 position 3434985, Chr19 position 4052713, Chr19 position 4052714, Chr19 position 4052749, Chr19 position 4374591, Chr19 position 5013982, Chr19 position 5048836, Chr19 position 5048867, Chr19 position 5048877, Chr19 position 8367279, Chr19 position 8428573, Chr19 position 10254577, Chr19 position 10254578, Chr19 position 10463956, Chr19 position 10464137, Chr19 position 13203671, Chr19 position 13266925, Chr19 position 13266934, Chr19 position 13266970, Chr19 position 13842142, Chr19 position 14248494, Chr19 position 15375465, Chr19 position 17218912, Chr19 position 17346702, Chr19 position 17346702, Chr19 position 18157161, Chr19 position 18157221, Chr19 position 18157258, Chr19 position 18415877, Chr19 position 18415890, Chr19 position 30606642, Chr19 position 35531842, Chr19 position 44303112, Chr19 position 47173037, Chr19 position 47316268, Chr19 position 47778278, Chr19 position 47778298, Chr20 position 34206950, Chr20 position 36771969, Chr20 position 48993661, Chr20 position 58406398, Chr20 position 61976049, Chr20 position 61976073, Chr20 position 62588571, Chr20 position 62588579, Chr22 position 19738127, Chr22 position 35965176, Chr22 position 36549809, Chr22 position 36973375, Chr22 position 37447953, Chr22 position 37914998, Chr22 position 38307317, Chr22 position 39662794, and Chr22 position 45622980.

[0076] In embodiments, the method includes detecting methylation or unmethylation of at least 500 of the following sites: Chr1 position 2996653, Chr1 position 11979164, Chr1 position 12655938, Chr1 position 16450525, Chr1 position 16450542, Chr1 position 16450545, Chr1 position 16469987, Chr1 position 17494491, Chr1 position 25473203, Chr1 position 27640460, Chr1 position 29565080, Chr1 position 38493013, Chr1 position 38493030, Chr1 position 38493074, Chr1 position 46713777, Chr1 position 46914121, Chr1 position 46955744, Chr1 position 55008344, Chr1 position 109816092, Chr1 position 109816111, Chr1 position 110074669, Chr1 position 110074681, Chr1 position 110074685, Chr1 position 150949856, Chr1 position 150949857, Chr1 position 153540282, Chr1 position 155162704, Chr1 position 155162714, Chr1 position 156676611, Chr1 position 157611881, Chr1 position 182205324, Chr1 position 204118999, Chr1 position 206741875, Chr1 position 206741989, Chr1 position 212587673, Chr1 position 212841198, Chr1 position 223403952, Chr1 position 233430972, Chr1 position 234342767, Chr2 position 3454277, Chr2 position 8793724, Chr2 position 20412441, Chr2 position 42329402, Chr2 position 42329494, Chr2 position 55289272, Chr2 position 65064865, Chr2 position 70823641, Chr2 position 73143689, Chr2 position 74454110, Chr2 position 122014529, Chr2 position 128158884, Chr2 position 128158910, Chr2 position 203114171, Chr2 position 218221671, Chr2 position 219745335, Chr2 position 238341465, Chr2 position 238341542, Chr2 position 238341546, Chr2 position 238774763, Chr3 position 13323642, Chr3 position 14180153, Chr3 position 45209073, Chr3 position 45209207, Chr3 position 52525100, Chr3 position 62589658, Chr3 position 65388317, Chr3 position 65388388, Chr3 position 73599302, Chr3 position 195636893, Chr3 position 197093846, Chr4 position 3743223, Chr4 position 5755716, Chr4 position 5755717, Chr4 position 5755728, Chr4 position 5755729, Chr4 position 5755734, Chr4 position 8372861, Chr4 position 57548289, Chr5 position 1118280, Chr5 position 34564389, Chr5 position 73871907, Chr5 position 78013596, Chr5 position 78013643, Chr5 position 137802650, Chr5 position 139051189, Chr5 position 167838221, Chr5 position 177541401, Chr5 position 180018672, Chr5 position 180101026, Chr6 position 3394325, Chr6 position 3887581, Chr6 position 7236568, Chr6 position 7728692, Chr6 position 34203617, Chr6 position 37751320, Chr6 position 41410682, Chr6 position 41438516, Chr6 position 41438575, Chr6 position 43464150, Chr6 position 158734279, Chr7 position 989235, Chr7 position 2673543, Chr7 position 73508602, Chr7 position 105079565, Chr7 position 105079631, Chr7 position 151425103, Chr7 position 151425104, Chr8 position 11764017, Chr8 position 21647308, Chr8 position 22548399, Chr8 position 22548483, Chr8 position 133570537, Chr8 position 141320393, Chr8 position 141320410, Chr9 position 6566568, Chr9 position 16197862, Chr9 position 34591313, Chr9 position 98225096, Chr9 position 126126741, Chr9 position 132083428, Chr9 position 136077410, Chr9 position 139655018, Chr9 position 140205985, Chr9 position 140205985, Chr9 position 140205997, Chr10 position 3929071, Chr10 position 30047012, Chr10 position 79702989, Chr10 position 87984905, Chr10 position 94838789, Chr10 position 102131187, Chr10 position 104196489, Chr10 position 111766879, Chr10 position 112258886, Chr10 position 112258984, Chr10 position 112259015, Chr10 position 116391763, Chr10 position 120011530, Chr10 position 126172714, Chr10 position 126172747, Chr11 position 556355, Chr11 position 821282, Chr11 position 12188937, Chr11 position 12188948, Chr11 position 12188995, Chr11 position 36057726, Chr11 position 48070143, Chr11 position 48070163, Chr11 position 48070166, Chr11 position 48070174, Chr11 position 65158294, Chr11 position 65158342, Chr11 position 65297089, Chr11 position 66104481, Chr11 position 66104485, Chr11 position 66104578, Chr11 position 68608767, Chr11 position 70236292, Chr11 position 70236320, Chr11 position 70236331, Chr1l position 115530032, Chr1l position 117950310, Chr1l position 117950329, Chr1l position 117950361, Chr1l position 117950362, Chr1l position 119293593, Chr12 position 679803, Chr12 position 26039132, Chr12 position 31004558, Chr12 position 45610695, Chr12 position 45610701, Chr12 position 45610702, Chr12 position 45610706, Chr12 position 50286016, Chr12 position 52243258, Chr12 position 52243286, Chr12 position 54145732, Chr12 position 54145741, Chr12 position 54145825, Chr12 position 56115043, Chr12 position 66262229, Chr12 position 66262230, Chr12 position 66262233, Chr12 position 66262234, Chr12 position 77266621, Chr12 position 117580102, Chr12 position 123435962, Chr12 position 123436011, Chr12 position 123436065, Chr12 position 123540893, Chr13 position 20735797, Chr13 position 23500419, Chr13 position 46771519, Chr13 position 46771520, Chr13 position 53313426, Chr13 position 113807393, Chr14 position 38599118, Chr14 position 69170010, Chr14 position 75701632, Chr14 position 75701643, Chr14 position 90850454, Chr14 position 97524282, Chr14 position 103541602, Chr14 position 103768055, Chr14 position 104209000, Chr14 position 104209068, Chr14 position 104354645, Chr14 position 104360487, Chr15 position 41068807, Chr15 position 61152225, Chr15 position 61152253, Chr15 position 61152313, Chr15 position 65186440, Chr15 position 68851629, Chr15 position 70667596, Chr15 position 70767206, Chr15 position 75251486, Chr15 position 77984014, Chr15 position 77989064, Chr15 position 83952081, Chr15 position 85402496, Chr15 position 85402497, Chr15 position 99417337, Chr16 position 1231873, Chr16 position 1458639, Chr16 position 3023231, Chr16 position 23135832, Chr16 position 29616265, Chr16 position 31009547, Chr16 position 31009548, Chr16 position 31009590, Chr16 position 57793674, Chr16 position 57793715, Chr16 position 57793727, Chr16 position 70771056, Chr16 position 70771079, Chr16 position 70771141, Chr16 position 77332010, Chr16 position 78540378, Chr16 position 79333435, Chr16 position 84262419, Chr16 position 88701114, Chr16 position 89988308, Chr16 position 89988644, Chr17 position 1509928, Chr17 position 1509945, Chr17 position 1509952, Chr17 position 1509953, Chr17 position 7644013, Chr17 position 16323460, Chr17 position 16323473, Chr17 position 16924561, Chr17 position 16924562, Chr17 position 16924594, Chr17 position 17717918, Chr17 position 17718591, Chr17 position 18139506, Chr17 position 35278031, Chr17 position 39677570, Chr17 position 40826257, Chr17 position 43037426, Chr17 position 43200096, Chr17 position 43200239, Chr17 position 43510142, Chr17 position 47987828, Chr17 position 48178379, Chr17 position 48596391, Chr17 position 48764165, Chr17 position 55701962, Chr17 position 73584599, Chr17 position 73993165, Chr17 position 75827716, Chr17 position 76882243, Chr17 position 78765910, Chr17 position 79544478, Chr17 position 80696474, Chr18 position 19751759, Chr18 position 21440760, Chr18 position 45555437, Chr18 position 45555438, Chr18 position 46547891, Chr18 position 55888885, Chr18 position 56452096, Chr18 position 56452476, Chr18 position 56887181, Chr18 position 76002973, Chr18 position 77331090, Chr19 position 677895, Chr19 position 884044, Chr19 position 884059, Chr19 position 884105, Chr19 position 884115, Chr19 position 1136511, Chr19 position 1177605, Chr19 position 1177612, Chr19 position 1177640, Chr19 position 1860601, Chr19 position 1860607, Chr19 position 2503954, Chr19 position 3434917, Chr19 position 3434921, Chr19 position 3434930, Chr19 position 3434939, Chr19 position 3434952, Chr19 position 3434954, Chr19 position 3434962, Chr19 position 3434964, Chr19 position 3434979, Chr19 position 3434985, Chr19 position 4052713, Chr19 position 4052714, Chr19 position 4052749, Chr19 position 4374591, Chr19 position 5013982, Chr19 position 5048836, Chr19 position 5048867, Chr19 position 5048877, Chr19 position 8367279, Chr19 position 8428573, Chr19 position 10254577, Chr19 position 10254578, Chr19 position 10463956, Chr19 position 10464137, Chr19 position 13203671, Chr19 position 13266925, Chr19 position 13266934, Chr19 position 13266970, Chr19 position 13842142, Chr19 position 14248494, Chr19 position 15375465, Chr19 position 17218912, Chr19 position 17346702, Chr19 position 17346702, Chr19 position 18157161, Chr19 position 18157221, Chr19 position 18157258, Chr19 position 18415877, Chr19 position 18415890, Chr19 position 30606642, Chr19 position 35531842, Chr19 position 44303112, Chr19 position 47173037, Chr19 position 47316268, Chr19 position 47778278, Chr19 position 47778298, Chr20 position 34206950, Chr20 position 36771969, Chr20 position 48993661, Chr20 position 58406398, Chr20 position 61976049, Chr20 position 61976073, Chr20 position 62588571, Chr20 position 62588579, Chr22 position 19738127, Chr22 position 35965176, Chr22 position 36549809, Chr22 position 36973375, Chr22 position 37447953, Chr22 position 37914998, Chr22 position 38307317, Chr22 position 39662794, and Chr22 position 45622980.

[0077] In embodiments, a method provided herein is practiced for a subject more than once over time. In embodiments, methylation or unmethylation of thyroid nodule DNA from a subject is assessed using a method provided herein at least 1, 2, 3, 4, 5, 6, 7, 8, 9, 10 or more times. In embodiments, the method is repeated at least once every 4, 6, 8, 12 or 18 months, or at least once every 2, 3, 4, or 5 more years.

[0078] In embodiments, the method includes: (i) isolating DNA from multiple cells of a thyroid nodule of the subject thereby forming a plurality of isolated thyroid nodule DNA molecules, (ii) contacting the plurality of isolated thyroid nodule DNA molecules with a bisulfite salt thereby forming a plurality of reacted thyroid nodule DNA molecules, (iii) detecting the proportion of DNA molecules in the plurality of reacted thyroid nodule DNA molecules having a uracil at a methylation site set forth in Table 1, thereby detecting methylation or unmethylation of said thyroid nodule DNA of the subject.

[0079] The methylation of a CpG site of interest may vary between individual cells (and even between chromosome pairs of individual cells) in a biological sample. When DNA is obtained from a biological sample and treated with a bisulfite salt to convert unmethylated cytosines to uracils, the bisulfite-treated DNA will typically contain (i) a proportion of DNA molecules with a cytosine at the site of interest (indicating that the site was methylated); and (ii) a proportion of DNA molecules with a uracil at the site of interest (indicating that the site was unmethylated). Since a uracil at a site of interest in bisulfite-treated DNA indicates that the site was unmethylated in the untreated DNA, a thymidine at the corresponding site in an amplicon of the bisulfite-treated DNA (e.g., an amplicon obtained by PCR) also indicates that the site was unmethylated in the untreated DNA.

[0080] In embodiments, the level of methylation at a site of interest is the proportion of bisulfite-treated DNA molecules having a cytosine rather than a uracil at that site of interest. In embodiments, the level of methylation at a site of interest is the proportion of amplicons of bisulfite-treated DNA molecules having a cytosine rather than a thymidine at that site of interest.

[0081] In embodiments, the level of unmethylation at a site of interest is the proportion of bisulfite-treated DNA molecules having a uracil rather than a cytosine at that site of interest. In embodiments, the level of unmethylation at a site of interest is the proportion of amplicons of bisulfite-treated DNA molecules having a thymidine rather than a cytosine at that site of interest. In Table 1, an indicated level of uracil is the proportion of bisulfite-treated DNA molecules having a uracil rather than a cytosine at the specified methylation site. The same levels listed in Table 1 also apply to the thymidine levels at a site of interest in an amplicon, i.e., the proportion of amplicons (derived from the PCR amplification of bisulfite-treated DNA molecules) having a thymidine rather than a cytosine at the specified methylation site.

[0082] The level of DNA methylation at a site of interest (e.g., a methylation site listed in Table 1) may be determined using sequencing technology. Sequencing technology can reveal nucleotide sequence variations in a plurality of DNA molecules at a single nucleotide base resolution. For example, the proportions of corresponding DNA molecules having a uracil, a thymidine, and/or a cytosine at a site may be determined. A non-limiting example of a sequencing-based method for determining the methylation level at a site of interest is described in Masser et al. (2015) Targeted DNA Methylation Analysis by Next-generation Sequencing, J Vis Exp. (96): 52488, the entire content of which is incorporated herein by reference.

[0083] The chromosomal positions listed in Tables 1-4 relate to the human genome that is publically accessible in the University of California Santa Cruz (UCSC) genome browser database under accession number HG19, the entire content of which is incorporated herein by reference in its entirety. Non-limiting information regarding the UCSC Genome Browser is provided in Kent W J, Sugnet C W, Furey T S, Roskin K M, Pringle T H, Zahler A M, Haussler D. The human genome browser at UCSC. Genome Res. 2002 June; 12(6):996-1006, the entire content of which is incorporated herein by reference. Each methylation site of interest listed in Table 1 may be located in other human genomes (e.g., within the genome of a specific subject or group of subjects) by replacing every U and R in the corresponding sequence with a C and then searching for the location of the X within a reference genome by aligning the sequence against the reference genome. For example, the methylation site of interest “X” in SEQ ID NO:1 may be located within a genome by replacing each U and R in SEQ ID NO: 1 with a C (to obtain the pre-bisulfite-modified sequence having an X at the site of interest) and then aligning the sequence against the genome using a BLAST algorithm. Also expressly provided, disclosed, and incorporated herein is the non-bisulfite-modified sequence corresponding to each of SEQ ID NOS: 1-550. The non-bisulfite-modified sequence corresponding to each of SEQ ID NOS:1-550 is each respective sequence in which each U and R is replaced with a C, where X is the methylation site of interest. For example, the non-bisulfite-modified sequence corresponding to SEQ ID NO:1 provided herein is a modified version of SEQ ID NO:1 in which each U and R in SEQ ID NO:1 is replaced with a C, where X is the methylation site of interest; the non-bisulfite-modified sequence corresponding to SEQ ID NO:2 provided herein is a modified version of SEQ ID NO:2 in which each U and R in SEQ ID NO:2 is replaced with a C, where X is the methylation site of interest; the non-bisulfite-modified sequence corresponding to SEQ ID NO:3 provided herein is a modified version of SEQ ID NO:3 in which each U and R in SEQ ID NO:3 is replaced with a C, where X is the methylation site of interest, and so on.

TABLE 1

| | | Uracil | Uracil | Uracil | | |
|---|---|---|---|---|---|---|
| | | level in | level in | level in | | |
| | | reacted | reacted | reacted | | |
| | | thyroid | thyroid | thyroid | | |
| | | nodule | nodule | nodule | | |
| | | DNA | DNA | DNA | | |
| | | from | from | from | | |
| | | cancer | benign | benign | | |
| | | tissues is | tissues is | tissues is | | |
| | | above | above | below | SEQ ID NO: | SEQ ID NO: |
| Chromosome | Chr | indicated | indicated | indicated | Forward | Reverse |
| (chr) | Position | level* | level* | level* | Strand | Strand |
| chr1 | 2996653 | N/A | 88.84 | N/A | 1 | 2 |
| chr1 | 11979164 | 89.29 | N/A | N/A | 3 | 4 |
| chr1 | 12655938 | N/A | N/A | 69.23 | 5 | 6 |
| chr1 | 16450525 | 70.00 | N/A | N/A | 7 | 8 |
| chr1 | 16450542 | 72.00 | N/A | N/A | 7 | 8 |
| chr1 | 16450545 | 73.33 | N/A | N/A | 7 | 8 |
| chr1 | 16469987 | 80.00 | N/A | N/A | 9 | 10 |
| chr1 | 17494491 | 86.00 | N/A | N/A | 11 | 12 |
| chr1 | 25473203 | 88.89 | N/A | N/A | 13 | 14 |
| chr1 | 27640460 | N/A | 80.56 | N/A | 15 | 16 |
| chr1 | 29565080 | N/A | N/A | 60.00 | 17 | 18 |
| chr1 | 38493013 | 86.36 | N/A | N/A | 19 | 20 |
| chr1 | 38493030 | 79.17 | N/A | N/A | 19 | 20 |
| chr1 | 38493074 | 80.95 | N/A | N/A | 19 | 20 |
| chr1 | 46713777 | N/A | N/A | 73.33 | 21 | 22 |
| chr1 | 46914121 | N/A | N/A | 60.00 | 23 | 24 |
| chr1 | 46955744 | N/A | N/A | 77.78 | 25 | 26 |
| chr1 | 55008344 | N/A | N/A | 60.00 | 27 | 28 |
| chr1 | 109816092 | 80.77 | N/A | N/A | 29 | 30 |
| chr1 | 109816111 | 80.77 | N/A | N/A | 29 | 30 |
| chr1 | 110074669 | 75.00 | N/A | N/A | 31 | 32 |
| chr1 | 110074681 | 71.43 | N/A | N/A | 31 | 32 |
| chr1 | 110074685 | 63.16 | N/A | N/A | 31 | 32 |
| chr1 | 150949856 | 89.29 | N/A | N/A | 33 | 34 |
| chr1 | 150949857 | 88.46 | N/A | N/A | 33 | 34 |
| chr1 | 153540282 | 78.26 | N/A | N/A | 35 | 36 |
| chr1 | 155162704 | 84.21 | N/A | N/A | 37 | 38 |
| chr1 | 155162714 | 88.64 | N/A | N/A | 37 | 38 |
| chr1 | 156676611 | N/A | N/A | 84.62 | 39 | 40 |
| chr1 | 157611881 | 83.05 | N/A | N/A | 41 | 42 |
| chr1 | 182205324 | 77.50 | N/A | N/A | 43 | 44 |
| chr1 | 204118999 | 59.09 | N/A | N/A | 45 | 46 |
| chr1 | 206741875 | 83.33 | N/A | N/A | 47 | 48 |
| chr1 | 206741989 | 66.67 | N/A | N/A | 49 | 50 |
| chr1 | 212587673 | N/A | N/A | 80.00 | 51 | 52 |
| chr1 | 212841198 | 85.29 | N/A | N/A | 53 | 54 |
| chr1 | 223403952 | 79.17 | N/A | N/A | 55 | 56 |
| chr1 | 233430972 | N/A | N/A | 86.67 | 57 | 58 |
| chr1 | 234342767 | 76.67 | N/A | N/A | 59 | 60 |
| chr10 | 3929071 | 88.68 | N/A | N/A | 61 | 62 |
| chr10 | 30047012 | 86.84 | N/A | N/A | 63 | 64 |
| chr10 | 79702989 | 83.33 | N/A | N/A | 65 | 66 |
| chr10 | 87984905 | 86.36 | N/A | N/A | 67 | 68 |
| chr10 | 94838789 | 63.33 | N/A | N/A | 69 | 70 |
| chr10 | 102131187 | 90.00 | N/A | N/A | 71 | 72 |
| chr10 | 104196489 | 75.00 | N/A | N/A | 73 | 74 |
| chr10 | 111766879 | 89.47 | N/A | N/A | 75 | 76 |
| chr10 | 112258886 | 81.82 | N/A | N/A | 77 | 78 |
| chr10 | 112258984 | 83.33 | N/A | N/A | 79 | 80 |
| chr10 | 112259015 | 82.61 | N/A | N/A | 79 | 80 |
| chr10 | 116391763 | N/A | N/A | 75.00 | 81 | 82 |
| chr10 | 120011530 | 79.55 | N/A | N/A | 83 | 84 |
| chr10 | 126172714 | N/A | 80.00 | N/A | 85 | 86 |
| chr10 | 126172747 | N/A | 84.62 | N/A | 85 | 86 |
| chr11 | 556355 | N/A | N/A | 75.00 | 87 | 88 |
| chr11 | 821282 | 89.13 | N/A | N/A | 89 | 90 |
| chr11 | 12188937 | 83.33 | N/A | N/A | 91 | 92 |
| chr11 | 12188948 | 77.78 | N/A | N/A | 91 | 92 |
| chr11 | 12188995 | 78.57 | N/A | N/A | 93 | 94 |
| chr11 | 36057726 | N/A | 79.63 | N/A | 95 | 96 |
| chr11 | 48070143 | N/A | 84.38 | N/A | 97 | 98 |
| chr11 | 48070163 | N/A | 87.50 | N/A | 97 | 98 |
| chr11 | 48070166 | N/A | 84.38 | N/A | 97 | 98 |
| chr11 | 48070174 | N/A | 84.48 | N/A | 97 | 98 |
| chr11 | 65158294 | 78.00 | N/A | N/A | 99 | 100 |
| chr11 | 65158342 | 85.00 | N/A | N/A | 99 | 100 |
| chr11 | 65297089 | 75.00 | N/A | N/A | 101 | 102 |
| chr11 | 66104481 | 81.58 | N/A | N/A | 103 | 104 |
| chr11 | 66104485 | 83.33 | N/A | N/A | 103 | 104 |
| chr11 | 66104578 | 81.82 | N/A | N/A | 105 | 106 |
| chr11 | 68608767 | N/A | N/A | 73.33 | 107 | 108 |
| chr11 | 70236292 | 89.29 | N/A | N/A | 109 | 110 |
| chr11 | 70236320 | 85.71 | N/A | N/A | 109 | 110 |
| chr11 | 70236331 | 70.83 | N/A | N/A | 109 | 110 |
| chr11 | 115530032 | N/A | N/A | 79.49 | 111 | 112 |
| chr11 | 117950310 | 79.55 | N/A | N/A | 113 | 114 |
| chr11 | 117950329 | 79.55 | N/A | N/A | 113 | 114 |
| chr11 | 117950361 | 80.00 | N/A | N/A | 115 | 116 |
| chr11 | 117950362 | 81.82 | N/A | N/A | 115 | 116 |
| chr11 | 119293593 | N/A | N/A | 60.00 | 117 | 118 |
| chr12 | 679803 | 86.84 | N/A | N/A | 119 | 120 |
| chr12 | 26039132 | 73.91 | N/A | N/A | 121 | 122 |
| chr12 | 31004558 | N/A | N/A | 81.82 | 123 | 124 |
| chr12 | 45610695 | N/A | N/A | 83.33 | 125 | 126 |
| chr12 | 45610701 | N/A | N/A | 86.67 | 125 | 126 |
| chr12 | 45610702 | N/A | N/A | 89.47 | 125 | 126 |
| chr12 | 45610706 | N/A | N/A | 80.00 | 125 | 126 |
| chr12 | 50286016 | 82.14 | N/A | N/A | 127 | 128 |
| chr12 | 52243258 | 82.00 | N/A | N/A | 129 | 130 |
| chr12 | 52243286 | 82.50 | N/A | N/A | 129 | 130 |
| chr12 | 54145732 | N/A | N/A | 82.35 | 131 | 132 |
| chr12 | 54145741 | N/A | N/A | 76.47 | 131 | 132 |
| chr12 | 54145825 | N/A | N/A | 70.59 | 131 | 132 |
| chr12 | 56115043 | 89.29 | N/A | N/A | 133 | 134 |
| chr12 | 66262229 | 72.22 | N/A | N/A | 135 | 136 |
| chr12 | 66262230 | 71.74 | N/A | N/A | 135 | 136 |
| chr12 | 66262233 | 68.27 | N/A | N/A | 135 | 136 |
| chr12 | 66262234 | 71.74 | N/A | N/A | 135 | 136 |
| chr12 | 77266621 | N/A | 73.53 | N/A | 137 | 138 |
| chr12 | 117580102 | 84.62 | N/A | N/A | 139 | 140 |
| chr12 | 123435962 | 63.89 | N/A | N/A | 141 | 142 |
| chr12 | 123436011 | 71.88 | N/A | N/A | 143 | 144 |
| chr12 | 123436065 | 69.44 | N/A | N/A | 143 | 144 |
| chr12 | 123540893 | 77.27 | N/A | N/A | 145 | 146 |
| chr13 | 20735797 | N/A | N/A | 82.35 | 147 | 148 |
| chr13 | 23500419 | N/A | N/A | 68.42 | 149 | 150 |
| chr13 | 46771519 | 67.65 | N/A | N/A | 151 | 152 |
| chr13 | 46771520 | 73.91 | N/A | N/A | 151 | 152 |
| chr13 | 53313426 | N/A | N/A | 60.00 | 153 | 154 |
| chr13 | 113807393 | N/A | N/A | 27.27 | 155 | 156 |
| chr14 | 38599118 | 65.91 | N/A | N/A | 157 | 158 |
| chr14 | 69170010 | 86.36 | N/A | N/A | 159 | 160 |
| chr14 | 75701632 | 68.42 | N/A | N/A | 161 | 162 |
| chr14 | 75701643 | 68.75 | N/A | N/A | 161 | 162 |
| chr14 | 90850454 | N/A | N/A | 54.55 | 163 | 164 |
| chr14 | 97524282 | N/A | 88.89 | N/A | 165 | 166 |
| chr14 | 103541602 | N/A | N/A | 52.00 | 167 | 168 |
| chr14 | 103768055 | 76.09 | N/A | N/A | 169 | 170 |
| chr14 | 104209000 | N/A | 80.77 | N/A | 171 | 172 |
| chr14 | 104209068 | N/A | 83.33 | N/A | 171 | 172 |
| chr14 | 104354645 | 72.92 | N/A | N/A | 173 | 174 |
| chr14 | 104360487 | 83.33 | N/A | N/A | 175 | 176 |
| chr15 | 41068807 | 69.12 | N/A | N/A | 177 | 178 |
| chr15 | 61152225 | 83.33 | N/A | N/A | 179 | 180 |
| chr15 | 61152253 | 86.67 | N/A | N/A | 181 | 182 |
| chr15 | 61152313 | 86.67 | N/A | N/A | 183 | 184 |
| chr15 | 65186440 | N/A | N/A | 55.56 | 185 | 186 |
| chr15 | 68851629 | N/A | N/A | 63.64 | 187 | 188 |
| chr15 | 70667596 | 83.33 | N/A | N/A | 189 | 190 |
| chr15 | 70767206 | 90.00 | N/A | N/A | 191 | 192 |
| chr15 | 75251486 | N/A | N/A | 60.00 | 193 | 194 |
| chr15 | 77984014 | N/A | 88.89 | N/A | 195 | 196 |
| chr15 | 77989064 | 73.53 | N/A | N/A | 197 | 198 |
| chr15 | 83952081 | N/A | N/A | 72.73 | 199 | 200 |
| chr15 | 85402496 | 82.10 | N/A | N/A | 201 | 202 |
| chr15 | 85402497 | 79.49 | N/A | N/A | 201 | 202 |
| chr15 | 99417337 | 88.89 | N/A | N/A | 203 | 204 |
| chr16 | 1231873 | 86.36 | N/A | N/A | 205 | 206 |
| chr16 | 1458639 | N/A | N/A | 75.00 | 207 | 208 |
| chr16 | 3023231 | N/A | 84.00 | N/A | 209 | 210 |
| chr16 | 23135832 | 87.50 | N/A | N/A | 211 | 212 |
| chr16 | 29616265 | 85.71 | N/A | N/A | 213 | 214 |
| chr16 | 31009547 | 84.00 | N/A | N/A | 215 | 216 |
| chr16 | 31009548 | 85.00 | N/A | N/A | 215 | 216 |
| chr16 | 31009590 | 85.00 | N/A | N/A | 215 | 216 |
| chr16 | 57793674 | 80.95 | N/A | N/A | 217 | 218 |
| chr16 | 57793715 | 85.71 | N/A | N/A | 217 | 218 |
| chr16 | 57793727 | 80.95 | N/A | N/A | 217 | 218 |
| chr16 | 70771056 | 68.75 | N/A | N/A | 219 | 220 |
| chr16 | 70771079 | 63.33 | N/A | N/A | 219 | 220 |
| chr16 | 70771141 | 65.79 | N/A | N/A | 219 | 220 |
| chr16 | 77332010 | 72.58 | N/A | N/A | 221 | 222 |
| chr16 | 78540378 | 75.76 | N/A | N/A | 223 | 224 |
| chr16 | 79333435 | N/A | 89.61 | N/A | 225 | 226 |
| chr16 | 84262419 | 87.23 | N/A | N/A | 227 | 228 |
| chr16 | 88701114 | N/A | N/A | 66.67 | 229 | 230 |
| chr16 | 89988308 | N/A | N/A | 83.33 | 231 | 232 |
| chr16 | 89988644 | N/A | N/A | 47.37 | 233 | 234 |
| chr17 | 1509928 | N/A | 88.46 | N/A | 235 | 236 |
| chr17 | 1509945 | N/A | 88.46 | N/A | 235 | 236 |
| chr17 | 1509952 | N/A | 83.93 | N/A | 235 | 236 |
| chr17 | 1509953 | N/A | 85.00 | N/A | 235 | 236 |
| chr17 | 7644013 | N/A | 85.42 | N/A | 237 | 238 |
| chr17 | 16323460 | 85.00 | N/A | N/A | 239 | 240 |
| chr17 | 16323473 | 84.21 | N/A | N/A | 239 | 240 |
| chr17 | 16924561 | 80.36 | N/A | N/A | 241 | 242 |
| chr17 | 16924562 | 75.71 | N/A | N/A | 241 | 242 |
| chr17 | 16924594 | 75.71 | N/A | N/A | 241 | 242 |
| chr17 | 17717918 | 72.73 | N/A | N/A | 243 | 244 |
| chr17 | 17718591 | 84.38 | N/A | N/A | 245 | 246 |
| chr17 | 18139506 | 82.81 | N/A | N/A | 247 | 248 |
| chr17 | 35278031 | N/A | N/A | 28.42 | 249 | 250 |
| chr17 | 39677570 | 71.88 | N/A | N/A | 251 | 252 |
| chr17 | 40826257 | N/A | N/A | 23.81 | 253 | 254 |
| chr17 | 43037426 | N/A | N/A | 33.33 | 255 | 256 |
| chr17 | 43200096 | 77.78 | N/A | N/A | 257 | 258 |
| chr17 | 43200239 | 85.00 | N/A | N/A | 259 | 260 |
| chr17 | 43510142 | N/A | N/A | 81.82 | 261 | 262 |
| chr17 | 47987828 | N/A | N/A | 69.23 | 263 | 264 |
| chr17 | 48178379 | 83.33 | N/A | N/A | 265 | 266 |
| chr17 | 48596391 | N/A | 88.64 | N/A | 267 | 268 |
| chr17 | 48764165 | 88.89 | N/A | N/A | 269 | 270 |
| chr17 | 55701962 | 68.75 | N/A | N/A | 271 | 272 |
| chr17 | 73584599 | N/A | N/A | 60.00 | 273 | 274 |
| chr17 | 73993165 | 90.00 | N/A | N/A | 275 | 276 |
| chr17 | 75827716 | 78.57 | N/A | N/A | 277 | 278 |
| chr17 | 76882243 | 61.54 | N/A | N/A | 279 | 280 |
| chr17 | 78765910 | 88.71 | N/A | N/A | 281 | 282 |
| chr17 | 79544478 | 83.15 | N/A | N/A | 283 | 284 |
| chr17 | 80696474 | 60.00 | N/A | N/A | 285 | 286 |
| chr18 | 19751759 | N/A | N/A | 33.33 | 287 | 288 |
| chr18 | 21440760 | 67.86 | N/A | N/A | 289 | 290 |
| chr18 | 45555437 | 66.18 | N/A | N/A | 291 | 292 |
| chr18 | 45555438 | 73.68 | N/A | N/A | 291 | 292 |
| chr18 | 46547891 | 76.09 | N/A | N/A | 293 | 294 |
| chr18 | 55888885 | 75.47 | N/A | N/A | 295 | 296 |
| chr18 | 56452096 | 90.00 | N/A | N/A | 297 | 298 |
| chr18 | 56452476 | 81.82 | N/A | N/A | 299 | 300 |
| chr18 | 56887181 | N/A | N/A | 60.00 | 301 | 302 |
| chr18 | 76002973 | 81.58 | N/A | N/A | 303 | 304 |
| chr18 | 77331090 | 81.03 | N/A | N/A | 305 | 306 |
| chr19 | 677895 | 85.29 | N/A | N/A | 307 | 308 |
| chr19 | 884044 | 76.92 | N/A | N/A | 309 | 310 |
| chr19 | 884059 | 76.92 | N/A | N/A | 309 | 310 |
| chr19 | 884105 | 84.62 | N/A | N/A | 311 | 312 |
| chr19 | 884115 | 84.62 | N/A | N/A | 311 | 312 |
| chr19 | 1136511 | 86.96 | N/A | N/A | 313 | 314 |
| chr19 | 1177605 | 73.68 | N/A | N/A | 315 | 316 |
| chr19 | 1177612 | 72.73 | N/A | N/A | 315 | 316 |
| chr19 | 1177640 | 81.82 | N/A | N/A | 315 | 316 |
| chr19 | 1860601 | 88.46 | N/A | N/A | 317 | 318 |
| chr19 | 1860607 | 82.81 | N/A | N/A | 317 | 318 |
| chr19 | 2503954 | 90.00 | N/A | N/A | 319 | 320 |
| chr19 | 3434917 | N/A | N/A | 40.00 | 321 | 322 |
| chr19 | 3434921 | N/A | N/A | 42.86 | 321 | 322 |
| chr19 | 3434930 | N/A | N/A | 57.14 | 321 | 322 |
| chr19 | 3434939 | N/A | N/A | 71.43 | 321 | 322 |
| chr19 | 3434952 | N/A | N/A | 71.43 | 321 | 322 |
| chr19 | 3434954 | N/A | N/A | 60.00 | 321 | 322 |
| chr19 | 3434962 | N/A | N/A | 71.43 | 321 | 322 |
| chr19 | 3434964 | N/A | N/A | 71.43 | 321 | 322 |
| chr19 | 3434979 | N/A | N/A | 66.67 | 321 | 322 |
| chr19 | 3434985 | N/A | N/A | 55.56 | 321 | 322 |
| chr19 | 4052713 | 85.56 | N/A | N/A | 323 | 324 |
| chr19 | 4052714 | 85.14 | N/A | N/A | 323 | 324 |
| chr19 | 4052749 | 84.62 | N/A | N/A | 323 | 324 |
| chr19 | 4374591 | 82.14 | N/A | N/A | 325 | 326 |
| chr19 | 5013982 | N/A | 83.33 | N/A | 327 | 328 |
| chr19 | 5048836 | 77.27 | N/A | N/A | 329 | 330 |
| chr19 | 5048867 | 70.59 | N/A | N/A | 329 | 330 |
| chr19 | 5048877 | 73.53 | N/A | N/A | 329 | 330 |
| chr19 | 8367279 | 75.00 | N/A | N/A | 331 | 332 |
| chr19 | 8428573 | N/A | N/A | 75.00 | 333 | 334 |
| chr19 | 10254577 | 76.25 | N/A | N/A | 335 | 336 |
| chr19 | 10254578 | 79.17 | N/A | N/A | 335 | 336 |
| chr19 | 10463956 | N/A | 86.73 | N/A | 337 | 338 |
| chr19 | 10464137 | N/A | 89.29 | N/A | 339 | 340 |
| chr19 | 13203671 | 75.86 | N/A | N/A | 341 | 342 |
| chr19 | 13266925 | N/A | N/A | 66.67 | 343 | 344 |
| chr19 | 13266934 | N/A | N/A | 66.67 | 343 | 344 |
| chr19 | 13266970 | N/A | N/A | 63.64 | 343 | 344 |
| chr19 | 13842142 | N/A | N/A | 76.47 | 345 | 346 |
| chr19 | 14248494 | N/A | N/A | 73.91 | 347 | 348 |
| chr19 | 15375465 | 72.22 | N/A | N/A | 349 | 350 |
| chr19 | 17218912 | 81.25 | N/A | N/A | 351 | 352 |
| chr19 | 17346702 | N/A | N/A | 85.71 | 353 | 354 |
| chr19 | 17346702 | N/A | N/A | 78.95 | 353 | 354 |
| chr19 | 18157161 | 88.24 | N/A | N/A | 355 | 356 |
| chr19 | 18157221 | 86.76 | N/A | N/A | 357 | 358 |
| chr19 | 18157258 | 65.22 | N/A | N/A | 359 | 360 |
| chr19 | 18415877 | N/A | N/A | 47.83 | 361 | 362 |
| chr19 | 18415890 | N/A | N/A | 47.83 | 361 | 362 |
| chr19 | 30606642 | 80.56 | N/A | N/A | 363 | 364 |
| chr19 | 35531842 | N/A | N/A | 83.33 | 365 | 366 |
| chr19 | 44303112 | N/A | N/A | 77.78 | 367 | 368 |
| chr19 | 47173037 | N/A | 88.64 | N/A | 369 | 370 |
| chr19 | 47316268 | 76.67 | N/A | N/A | 371 | 372 |
| chr19 | 47778278 | N/A | N/A | 66.67 | 373 | 374 |
| chr19 | 47778298 | N/A | N/A | 83.33 | 373 | 374 |
| chr2 | 3454277 | N/A | 84.78 | N/A | 375 | 376 |
| chr2 | 8793724 | N/A | 78.57 | N/A | 377 | 378 |
| chr2 | 20412441 | 85.71 | N/A | N/A | 379 | 380 |
| chr2 | 42329402 | N/A | N/A | 78.95 | 381 | 382 |
| chr2 | 42329494 | N/A | N/A | 60.00 | 381 | 382 |
| chr2 | 55289272 | N/A | 75.00 | N/A | 383 | 384 |
| chr2 | 65064865 | 64.71 | N/A | N/A | 385 | 386 |
| chr2 | 70823641 | 79.03 | N/A | N/A | 387 | 388 |
| chr2 | 73143689 | N/A | N/A | 77.78 | 389 | 390 |
| chr2 | 74454110 | 70.00 | N/A | N/A | 391 | 392 |
| chr2 | 122014529 | N/A | 86.36 | N/A | 393 | 394 |
| chr2 | 128158884 | 85.00 | N/A | N/A | 395 | 396 |
| chr2 | 128158910 | 77.50 | N/A | N/A | 395 | 396 |
| chr2 | 203114171 | 79.63 | N/A | N/A | 397 | 398 |
| chr2 | 218221671 | N/A | 85.19 | N/A | 399 | 400 |
| chr2 | 219745335 | N/A | N/A | 81.82 | 401 | 402 |
| chr2 | 238341465 | 86.36 | N/A | N/A | 403 | 404 |
| chr2 | 238341542 | 90.00 | N/A | N/A | 405 | 406 |
| chr2 | 238341546 | 87.50 | N/A | N/A | 405 | 406 |
| chr2 | 238774763 | 67.57 | N/A | N/A | 407 | 408 |
| chr20 | 31126186 | 87.50 | N/A | N/A | 409 | 410 |
| chr20 | 31126189 | 84.21 | N/A | N/A | 409 | 410 |
| chr20 | 34206950 | N/A | N/A | 76.47 | 411 | 412 |
| chr20 | 36771969 | 79.31 | N/A | N/A | 413 | 414 |
| chr20 | 48993661 | 80.00 | N/A | N/A | 415 | 416 |
| chr20 | 58406398 | 89.66 | N/A | N/A | 417 | 418 |
| chr20 | 61976049 | 87.93 | N/A | N/A | 419 | 420 |
| chr20 | 61976073 | 89.66 | N/A | N/A | 419 | 420 |
| chr20 | 62588571 | N/A | N/A | 50.00 | 421 | 422 |
| chr20 | 62588579 | N/A | N/A | 38.46 | 421 | 422 |
| chr22 | 19738127 | 70.59 | N/A | N/A | 423 | 424 |
| chr22 | 35965176 | 76.32 | N/A | N/A | 425 | 426 |
| chr22 | 36549809 | 83.33 | N/A | N/A | 427 | 428 |
| chr22 | 36973375 | 80.43 | N/A | N/A | 429 | 430 |
| chr22 | 37447953 | N/A | N/A | 73.33 | 431 | 432 |
| chr22 | 37914998 | N/A | N/A | 69.23 | 433 | 434 |
| chr22 | 38307317 | N/A | 89.66 | N/A | 435 | 436 |
| chr22 | 39662794 | 84.62 | N/A | N/A | 437 | 438 |
| chr22 | 45622980 | 85.00 | N/A | N/A | 439 | 440 |
| chr3 | 13323642 | N/A | N/A | 72.73 | 441 | 442 |
| chr3 | 14180153 | 57.89 | N/A | N/A | 443 | 444 |
| chr3 | 45209073 | N/A | N/A | 60.00 | 445 | 446 |
| chr3 | 45209207 | N/A | N/A | 83.33 | 447 | 448 |
| chr3 | 52525100 | 79.41 | N/A | N/A | 449 | 450 |
| chr3 | 62589658 | 87.50 | N/A | N/A | 451 | 452 |
| chr3 | 65388317 | 71.43 | N/A | N/A | 453 | 454 |
| chr3 | 65388388 | 79.31 | N/A | N/A | 455 | 456 |
| chr3 | 73599302 | 85.11 | N/A | N/A | 457 | 458 |
| chr3 | 195636893 | N/A | N/A | 84.62 | 459 | 460 |
| chr3 | 197093846 | 80.00 | N/A | N/A | 461 | 462 |
| chr4 | 3743223 | 68.18 | N/A | N/A | 463 | 464 |
| chr4 | 5755716 | 85.48 | N/A | N/A | 465 | 466 |
| chr4 | 5755717 | 80.00 | N/A | N/A | 465 | 466 |
| chr4 | 5755728 | 82.26 | N/A | N/A | 465 | 466 |
| chr4 | 5755729 | 79.17 | N/A | N/A | 465 | 466 |
| chr4 | 5755734 | 79.17 | N/A | N/A | 465 | 466 |
| chr4 | 8372861 | N/A | 85.71 | N/A | 467 | 468 |
| chr4 | 57548289 | 80.23 | N/A | N/A | 469 | 470 |
| chr5 | 1118280 | 73.08 | N/A | N/A | 471 | 472 |
| chr5 | 34564389 | 89.29 | N/A | N/A | 473 | 474 |
| chr5 | 73871907 | 89.47 | N/A | N/A | 475 | 476 |
| chr5 | 78013596 | 70.00 | N/A | N/A | 477 | 478 |
| chr5 | 78013643 | 80.00 | N/A | N/A | 479 | 480 |
| chr5 | 137802650 | 72.73 | N/A | N/A | 481 | 482 |
| chr5 | 139051189 | 84.09 | N/A | N/A | 483 | 484 |
| chr5 | 167838221 | 68.18 | N/A | N/A | 485 | 486 |
| chr5 | 177541401 | N/A | N/A | 69.23 | 487 | 488 |
| chr5 | 180018672 | N/A | N/A | 72.73 | 489 | 490 |
| chr5 | 180101026 | N/A | N/A | 64.71 | 491 | 492 |
| chr6 | 3394325 | N/A | 87.84 | N/A | 493 | 494 |
| chr6 | 3887581 | N/A | 85.71 | N/A | 495 | 496 |
| chr6 | 7236568 | 84.43 | N/A | N/A | 497 | 498 |
| chr6 | 7728692 | N/A | N/A | 73.33 | 499 | 500 |
| chr6 | 34203617 | N/A | N/A | 45.45 | 501 | 502 |
| chr6 | 37751320 | N/A | N/A | 78.57 | 503 | 504 |
| chr6 | 41410682 | N/A | N/A | 77.78 | 505 | 506 |
| chr6 | 41438516 | N/A | N/A | 39.13 | 507 | 508 |
| chr6 | 41438575 | 89.66 | N/A | N/A | 507 | 508 |
| chr6 | 43464150 | 75.76 | N/A | N/A | 509 | 510 |
| chr6 | 158734279 | N/A | 86.84 | N/A | 511 | 512 |
| chr7 | 989235 | 76.67 | N/A | N/A | 513 | 514 |
| chr7 | 2673543 | 82.14 | N/A | N/A | 515 | 516 |
| chr7 | 73508602 | N/A | N/A | 85.71 | 517 | 518 |
| chr7 | 105079565 | 78.75 | N/A | N/A | 519 | 520 |
| chr7 | 105079631 | 71.25 | N/A | N/A | 519 | 520 |
| chr7 | 151425103 | 86.96 | N/A | N/A | 521 | 522 |
| chr7 | 151425104 | 76.19 | N/A | N/A | 521 | 522 |
| chr8 | 11764017 | 80.77 | N/A | N/A | 523 | 524 |
| chr8 | 21647308 | N/A | N/A | 71.43 | 525 | 526 |
| chr8 | 22548399 | N/A | 88.16 | N/A | 527 | 528 |
| chr8 | 22548483 | N/A | 87.50 | N/A | 527 | 528 |
| chr8 | 133570537 | N/A | 80.00 | N/A | 529 | 530 |
| chr8 | 141320393 | 75.00 | N/A | N/A | 531 | 532 |
| chr8 | 141320410 | 85.00 | N/A | N/A | 531 | 532 |
| chr9 | 6566568 | 86.84 | N/A | N/A | 533 | 534 |
| chr9 | 16197862 | N/A | 86.36 | N/A | 535 | 536 |
| chr9 | 34591313 | N/A | N/A | 80.00 | 537 | 538 |
| chr9 | 98225096 | N/A | N/A | 22.22 | 539 | 540 |
| chr9 | 126126741 | 86.11 | N/A | N/A | 541 | 542 |
| chr9 | 132083428 | N/A | N/A | 70.59 | 543 | 544 |
| chr9 | 136077410 | 73.91 | N/A | N/A | 545 | 546 |
| chr9 | 139655018 | 83.33 | N/A | N/A | 547 | 548 |
| chr9 | 140205985 | 75.00 | N/A | N/A | 549 | 550 |
| chr9 | 140205985 | 83.33 | N/A | N/A | 549 | 550 |
| chr9 | 140205997 | 79.17 | N/A | N/A | 549 | 550 |

*Level values provided are the proportion (percentage) of reacted thyroid nodule DNA molecules having a uracil at the methylation site of interest. When amplicons generated from reacted thyroid nodule DNA molecules (e.g., by PCR) are used to assess the level of methylation, the values provided correspond to the proportion of amplicons having a thymidine at the nucleotide position that corresponds to the methylation site of interest.

[0084] In embodiments, the method of detecting methylation or unmethylation of a thyroid nodule DNA of a subject detects an alteration in methylation including increase or loss of uracil level at plurality of methylation sites. In embodiments, the method of detecting methylation or unmethylation of a thyroid nodule DNA of a subject detects an alteration in methylation including increase or loss of thymidine level at plurality of methylation sites. The indicated levels in Tables 1, 2, 3, and 4, are approximate indicated levels, and include values that are within about 15%, about 10%, or about 5% above and below the indicated levels.

[0085] In embodiments, the method detects the uracil level above about a threshold as set forth in Table 2 in subjects with a cancerous thyroid nodule. In embodiments, the method detects the thymidine level above about a threshold as set forth in Table 2 in subjects with a cancerous thyroid nodule.

TABLE 2
Methylation Threshold for Cancerous Thyroid Nodule

| | | Uracil level in reacted |
|---|---|---|
| | | thyroid nodule DNA from |
| | Chromosomal | cancer tissues is about |
| Chromosome | Position | above indicated level* |
| chr1 | 11979164 | 89.29 |
| chr1 | 16450525 | 70.00 |
| chr1 | 16450542 | 72.00 |
| chr1 | 16450545 | 73.33 |
| chr1 | 16469987 | 80.00 |
| chr1 | 17494491 | 86.00 |
| chr1 | 25473203 | 88.89 |
| chr1 | 38493013 | 86.36 |
| chr1 | 38493030 | 79.17 |
| chr1 | 38493074 | 80.95 |
| chr1 | 109816092 | 80.77 |
| chr1 | 109816111 | 80.77 |
| chr1 | 110074669 | 75.00 |
| chr1 | 110074681 | 71.43 |
| chr1 | 110074685 | 63.16 |
| chr1 | 150949856 | 89.29 |
| chr1 | 150949857 | 88.46 |
| chr1 | 153540282 | 78.26 |
| chr1 | 155162704 | 84.21 |
| chr1 | 155162714 | 88.64 |
| chr1 | 157611881 | 83.05 |
| chr1 | 182205324 | 77.50 |
| chr1 | 204118999 | 59.09 |
| chr1 | 206741875 | 83.33 |
| chr1 | 206741989 | 66.67 |
| chr1 | 212841198 | 85.29 |
| chr1 | 223403952 | 79.17 |
| chr1 | 234342767 | 76.67 |
| chr10 | 3929071 | 88.68 |
| chr10 | 30047012 | 86.84 |
| chr10 | 79702989 | 83.33 |
| chr10 | 87984905 | 86.36 |
| chr10 | 94838789 | 63.33 |
| chr10 | 102131187 | 90.00 |
| chr10 | 104196489 | 75.00 |
| chr10 | 111766879 | 89.47 |
| chr10 | 112258886 | 81.82 |
| chr10 | 112258984 | 83.33 |
| chr10 | 112259015 | 82.61 |
| chr10 | 120011530 | 79.55 |
| chr11 | 821282 | 89.13 |
| chr11 | 12188937 | 83.33 |
| chr11 | 12188948 | 77.78 |
| chr11 | 12188995 | 78.57 |
| chr11 | 65158294 | 78.00 |
| chr11 | 65158342 | 85.00 |
| chr11 | 65297089 | 75.00 |
| chr11 | 66104481 | 81.58 |
| chr11 | 66104485 | 83.33 |
| chr11 | 66104578 | 81.82 |
| chr11 | 70236292 | 89.29 |
| chr11 | 70236320 | 85.71 |
| chr11 | 70236331 | 70.83 |
| chr11 | 117950310 | 79.55 |
| chr11 | 117950329 | 79.55 |
| chr11 | 117950361 | 80.00 |
| chr11 | 117950362 | 81.82 |
| chr12 | 679803 | 86.84 |
| chr12 | 26039132 | 73.91 |
| chr12 | 50286016 | 82.14 |
| chr12 | 52243258 | 82.00 |
| chr12 | 52243286 | 82.50 |
| chr12 | 56115043 | 89.29 |
| chr12 | 66262229 | 72.22 |
| chr12 | 66262230 | 71.74 |
| chr12 | 66262233 | 68.27 |
| chr12 | 66262234 | 71.74 |
| chr12 | 117580102 | 84.62 |
| chr12 | 123435962 | 63.89 |
| chr12 | 123436011 | 71.88 |
| chr12 | 123436065 | 69.44 |
| chr12 | 123540893 | 77.27 |
| chr13 | 46771519 | 67.65 |
| chr13 | 46771520 | 73.91 |
| chr14 | 38599118 | 65.91 |
| chr14 | 69170010 | 86.36 |
| chr14 | 75701632 | 68.42 |
| chr14 | 75701643 | 68.75 |
| chr14 | 103768055 | 76.09 |
| chr14 | 104354645 | 72.92 |
| chr14 | 104360487 | 83.33 |
| chr15 | 41068807 | 69.12 |
| chr15 | 61152225 | 83.33 |
| chr15 | 61152253 | 86.67 |
| chr15 | 61152313 | 86.67 |
| chr15 | 70667596 | 83.33 |
| chr15 | 70767206 | 90.00 |
| chr15 | 77989064 | 73.53 |
| chr15 | 85402496 | 82.10 |
| chr15 | 85402497 | 79.49 |
| chr15 | 99417337 | 88.89 |
| chr16 | 1231873 | 86.36 |
| chr16 | 23135832 | 87.50 |
| chr16 | 29616265 | 85.71 |
| chr16 | 31009547 | 84.00 |
| chr16 | 31009548 | 85.00 |
| chr16 | 31009590 | 85.00 |
| chr16 | 57793674 | 80.95 |
| chr16 | 57793715 | 85.71 |
| chr16 | 57793727 | 80.95 |
| chr16 | 70771056 | 68.75 |
| chr16 | 70771079 | 63.33 |
| chr16 | 70771141 | 65.79 |
| chr16 | 77332010 | 72.58 |
| chr16 | 78540378 | 75.76 |
| chr16 | 84262419 | 87.23 |
| chr17 | 16323460 | 85.00 |
| chr17 | 16323473 | 84.21 |
| chr17 | 16924561 | 80.36 |
| chr17 | 16924562 | 75.71 |
| chr17 | 16924594 | 75.71 |
| chr17 | 17717918 | 72.73 |
| chr17 | 17718591 | 84.38 |
| chr17 | 18139506 | 82.81 |
| chr17 | 39677570 | 71.88 |
| chr17 | 43200096 | 77.78 |
| chr17 | 43200239 | 85.00 |
| chr17 | 48178379 | 83.33 |
| chr17 | 48764165 | 88.89 |
| chr17 | 55701962 | 68.75 |
| chr17 | 73993165 | 90.00 |
| chr17 | 75827716 | 78.57 |
| chr17 | 76882243 | 61.54 |
| chr17 | 78765910 | 88.71 |
| chr17 | 79544478 | 83.15 |
| chr17 | 80696474 | 60.00 |
| chr18 | 21440760 | 67.86 |
| chr18 | 45555437 | 66.18 |
| chr18 | 45555438 | 73.68 |
| chr18 | 46547891 | 76.09 |
| chr18 | 55888885 | 75.47 |
| chr18 | 56452096 | 90.00 |
| chr18 | 56452476 | 81.82 |
| chr18 | 76002973 | 81.58 |
| chr18 | 77331090 | 81.03 |
| chr19 | 677895 | 85.29 |
| chr19 | 884044 | 76.92 |
| chr19 | 884059 | 76.92 |
| chr19 | 884105 | 84.62 |
| chr19 | 884115 | 84.62 |
| chr19 | 1136511 | 86.96 |
| chr19 | 1177605 | 73.68 |
| chr19 | 1177612 | 72.73 |
| chr19 | 1177640 | 81.82 |
| chr19 | 1860601 | 88.46 |
| chr19 | 1860607 | 82.81 |
| chr19 | 2503954 | 90.00 |
| chr19 | 4052713 | 85.56 |
| chr19 | 4052714 | 85.14 |
| chr19 | 4052749 | 84.62 |
| chr19 | 4374591 | 82.14 |
| chr19 | 5048836 | 77.27 |
| chr19 | 5048867 | 70.59 |
| chr19 | 5048877 | 73.53 |
| chr19 | 8367279 | 75.00 |
| chr19 | 10254577 | 76.25 |
| chr19 | 10254578 | 79.17 |
| chr19 | 13203671 | 75.86 |
| chr19 | 15375465 | 72.22 |
| chr19 | 17218912 | 81.25 |
| chr19 | 18157161 | 88.24 |
| chr19 | 18157221 | 86.76 |
| chr19 | 18157258 | 65.22 |
| chr19 | 30606642 | 80.56 |
| chr19 | 47316268 | 76.67 |
| chr2 | 20412441 | 85.71 |
| chr2 | 65064865 | 64.71 |
| chr2 | 70823641 | 79.03 |
| chr2 | 74454110 | 70.00 |
| chr2 | 128158884 | 85.00 |
| chr2 | 128158910 | 77.50 |
| chr2 | 203114171 | 79.63 |
| chr2 | 238341465 | 86.36 |
| chr2 | 238341542 | 90.00 |
| chr2 | 238341546 | 87.50 |
| chr2 | 238774763 | 67.57 |
| chr20 | 31126186 | 87.50 |
| chr20 | 31126189 | 84.21 |
| chr20 | 36771969 | 79.31 |
| chr20 | 48993661 | 80.00 |
| chr20 | 58406398 | 89.66 |
| chr20 | 61976049 | 87.93 |
| chr20 | 61976073 | 89.66 |
| chr22 | 19738127 | 70.59 |
| chr22 | 35965176 | 76.32 |
| chr22 | 36549809 | 83.33 |
| chr22 | 36973375 | 80.43 |
| chr22 | 39662794 | 84.62 |
| chr22 | 45622980 | 85.00 |
| chr3 | 14180153 | 57.89 |
| chr3 | 52525100 | 79.41 |
| chr3 | 62589658 | 87.50 |
| chr3 | 65388317 | 71.43 |
| chr3 | 65388388 | 79.31 |
| chr3 | 73599302 | 85.11 |
| chr3 | 197093846 | 80.00 |
| chr4 | 3743223 | 68.18 |
| chr4 | 5755716 | 85.48 |
| chr4 | 5755717 | 80.00 |
| chr4 | 5755728 | 82.26 |
| chr4 | 5755729 | 79.17 |
| chr4 | 5755734 | 79.17 |
| chr4 | 57548289 | 80.23 |
| chr5 | 1118280 | 73.08 |
| chr5 | 34564389 | 89.29 |
| chr5 | 73871907 | 89.47 |
| chr5 | 78013596 | 70.00 |
| chr5 | 78013643 | 80.00 |
| chr5 | 137802650 | 72.73 |
| chr5 | 139051189 | 84.09 |
| chr5 | 167838221 | 68.18 |
| chr6 | 7236568 | 84.43 |
| chr6 | 41438575 | 89.66 |
| chr6 | 43464150 | 75.76 |
| chr7 | 989235 | 76.67 |
| chr7 | 2673543 | 82.14 |
| chr7 | 105079565 | 78.75 |
| chr7 | 105079631 | 71.25 |
| chr7 | 151425103 | 86.96 |
| chr7 | 151425104 | 76.19 |
| chr8 | 11764017 | 80.77 |
| chr8 | 141320393 | 75.00 |
| chr8 | 141320410 | 85.00 |
| chr9 | 6566568 | 86.84 |
| chr9 | 126126741 | 86.11 |
| chr9 | 136077410 | 73.91 |
| chr9 | 139655018 | 83.33 |
| chr9 | 140205985 | 75.00 |
| chr9 | 140205989 | 83.33 |
| chr9 | 140205997 | 79.17 |

*Level values provided are the proportion (percentage) of reacted thyroid nodule DNA molecules having a uracil at the methylation site of interest. When amplicons generated from reacted thyroid nodule DNA molecules (e.g., by PCR) are used to assess the level of methylation, the values provided correspond to the proportion of amplicons having a thymidine at the nucleotide position that corresponds to the methylation site of interest.

[0086] In embodiments, the uracil level is above a threshold as set forth in Table 3 in subjects with benign thyroid nodules. In embodiments, the thymidine level is above a threshold as set forth in Table 3 in subjects with benign thyroid nodules.

TABLE 3
Threshold for Benign Thyroid Nodule

| | | Uracil level in |
|---|---|---|
| | | reacted thyroid |
| | | nodule DNA from |
| | | benign tissues is |
| | Chromosomal | about above |
| Chromosome | Position | indicated level* |
| chr1 | 2996653 | 88.84 |
| chr1 | 27640460 | 80.56 |
| chr10 | 126172714 | 80.00 |
| chr10 | 126172747 | 84.62 |
| chr11 | 36057726 | 79.63 |
| chr11 | 48070143 | 84.38 |
| chr11 | 48070163 | 87.50 |
| chr11 | 48070166 | 84.38 |
| chr11 | 48070174 | 84.48 |
| chr12 | 77266621 | 73.53 |
| chr14 | 97524282 | 88.89 |
| chr14 | 104209000 | 80.77 |
| chr14 | 104209068 | 83.33 |
| chr15 | 77984014 | 88.89 |
| chr16 | 3023231 | 84.00 |
| chr16 | 79333435 | 89.61 |
| chr17 | 1509928 | 88.46 |
| chr17 | 1509945 | 88.46 |
| chr17 | 1509952 | 83.93 |
| chr17 | 1509953 | 85.00 |
| chr17 | 7644013 | 85.42 |
| chr17 | 48596391 | 88.64 |
| chr19 | 5013982 | 83.33 |
| chr19 | 10463956 | 86.73 |
| chr19 | 10464137 | 89.29 |
| chr19 | 47173037 | 88.64 |
| chr2 | 3454277 | 84.78 |
| chr2 | 8793724 | 78.57 |
| chr2 | 55289272 | 75.00 |
| chr2 | 122014529 | 86.36 |
| chr2 | 218221671 | 85.19 |
| chr22 | 38307317 | 89.66 |
| chr4 | 8372861 | 85.71 |
| chr6 | 3394325 | 87.84 |
| chr6 | 3887581 | 85.71 |
| chr6 | 1.59E+08 | 86.84 |
| chr8 | 22548399 | 88.16 |
| chr8 | 22548483 | 87.50 |
| chr8 | 1.34E+08 | 80.00 |
| chr9 | 16197862 | 86.36 |

*Level values provided are the proportion (percentage) of reacted thyroid nodule DNA molecules having a uracil at the methylation site of interest. When amplicons generated from reacted thyroid nodule DNA molecules (e.g., by PCR) are used to assess the level of methylation, the values provided correspond to the proportion of amplicons having a thymidine at the nucleotide position that corresponds to the methylation site of interest.

[0087] In embodiments, the uracil level is below a threshold as set forth in Table 4 in subjects with benign thyroid nodule. In embodiments, the thymidine level is below a threshold as set forth in Table 4 in subjects with benign thyroid nodule.

TABLE 4
Methylation Threshold for Benign Thyroid Nodule

| | | Uracil level in reacted |
|---|---|---|
| | | thyroid nodule DNA from |
| | Chromosomal | benign tissues is about |
| Chromosome | Position | below indicated level* |
| chr1 | 12655938 | 69.23 |
| chr1 | 29565080 | 60.00 |
| chr1 | 46713777 | 73.33 |
| chr1 | 46914121 | 60.00 |
| chr1 | 46955744 | 77.78 |
| chr1 | 55008344 | 60.00 |
| chr1 | 156676611 | 84.62 |
| chr1 | 212587673 | 80.00 |
| chr1 | 233430972 | 86.67 |
| chr10 | 116391763 | 75.00 |
| chr11 | 556355 | 75.00 |
| chr11 | 68608767 | 73.33 |
| chr11 | 115530032 | 79.49 |
| chr11 | 119293593 | 60.00 |
| chr12 | 31004558 | 81.82 |
| chr12 | 45610695 | 83.33 |
| chr12 | 45610701 | 86.67 |
| chr12 | 45610702 | 89.47 |
| chr12 | 45610706 | 80.00 |
| chr12 | 54145732 | 82.35 |
| chr12 | 54145741 | 76.47 |
| chr12 | 54145825 | 70.59 |
| chr13 | 20735797 | 82.35 |
| chr13 | 23500419 | 68.42 |
| chr13 | 53313426 | 60.00 |
| chr13 | 113807393 | 27.27 |
| chr14 | 90850454 | 54.55 |
| chr14 | 103541602 | 52.00 |
| chr15 | 65186440 | 55.56 |
| chr15 | 68851629 | 63.64 |
| chr15 | 75251486 | 60.00 |
| chr15 | 83952081 | 72.73 |
| chr16 | 1458639 | 75.00 |
| chr16 | 88701114 | 66.67 |
| chr16 | 89988308 | 83.33 |
| chr16 | 89988644 | 47.37 |
| chr17 | 35278031 | 28.42 |
| chr17 | 40826257 | 23.81 |
| chr17 | 43037426 | 33.33 |
| chr17 | 43510142 | 81.82 |
| chr17 | 47987828 | 69.23 |
| chr17 | 73584599 | 60.00 |
| chr18 | 19751759 | 33.33 |
| chr18 | 56887181 | 60.00 |
| chr19 | 3434917 | 40.00 |
| chr19 | 3434921 | 42.86 |
| chr19 | 3434930 | 57.14 |
| chr19 | 3434939 | 71.43 |
| chr19 | 3434952 | 71.43 |
| chr19 | 3434954 | 60.00 |
| chr19 | 3434962 | 71.43 |
| chr19 | 3434964 | 71.43 |
| chr19 | 3434979 | 66.67 |
| chr19 | 3434985 | 55.56 |
| chr19 | 8428573 | 75.00 |
| chr19 | 13266925 | 66.67 |
| chr19 | 13266934 | 66.67 |
| chr19 | 13266970 | 63.64 |
| chr19 | 13842142 | 76.47 |
| chr19 | 14248494 | 73.91 |
| chr19 | 17346702 | 85.71 |
| chr19 | 17346735 | 78.95 |
| chr19 | 18415877 | 47.83 |
| chr19 | 18415890 | 47.83 |
| chr19 | 35531842 | 83.33 |
| chr19 | 44303112 | 77.78 |
| chr19 | 47778278 | 66.67 |
| chr19 | 47778298 | 83.33 |
| chr2 | 42329402 | 78.95 |
| chr2 | 42329494 | 60.00 |
| chr2 | 73143689 | 77.78 |
| chr2 | 219745335 | 81.82 |
| chr20 | 34206950 | 76.47 |
| chr20 | 62588571 | 50.00 |
| chr20 | 62588579 | 38.46 |
| chr22 | 37447953 | 73.33 |
| chr22 | 37914998 | 69.23 |
| chr3 | 13323642 | 72.73 |
| chr3 | 45209073 | 60.00 |
| chr3 | 45209207 | 83.33 |
| chr3 | 195636893 | 84.62 |
| chr5 | 177541401 | 69.23 |
| chr5 | 180018672 | 72.73 |
| chr5 | 180101026 | 64.71 |
| chr6 | 7728692 | 73.33 |
| chr6 | 34203617 | 45.45 |
| chr6 | 37751320 | 78.57 |
| chr6 | 41410682 | 77.78 |
| chr6 | 41438516 | 39.13 |
| chr7 | 73508602 | 85.71 |
| chr8 | 21647308 | 71.43 |
| chr9 | 34591313 | 80.00 |
| chr9 | 98225096 | 22.22 |
| chr9 | 132083428 | 70.59 |

*Level values provided are the proportion (percentage) of reacted thyroid nodule DNA molecules having a uracil at the methylation site of interest. When amplicons generated from reacted thyroid nodule DNA molecules (e.g., by PCR) are used to assess the level of methylation, the values provided correspond to the proportion of amplicons having a thymidine at the nucleotide position that corresponds to the methylation site of interest.

[0088] In embodiments, the method of detecting methylation or unmethylation of a thyroid nodule DNA is of a candidate thyroid cancer patient. In embodiments, the subject is suspected of having thyroid cancer. In embodiments, the subject has thyroid cancer.

[0089] In embodiments, the method of detecting methylation or unmethylation of a thyroid nodule DNA is based on the level of uracil as set forth Table 2, in which the uracil level above the threshold identifies the thyroid nodule as a cancerous thyroid nodule. In embodiments, the method of detecting methylation or unmethylation of a thyroid nodule DNA is based on a level of thymidine indicated in Table 2, in which the thymidine level above the threshold identifies the thyroid nodule as a cancerous thyroid nodule. In embodiments, the level is the proportion of molecules (e.g., in a plurality of reacted thyroid nodule DNA molecules or a plurality of reacted thyroid nodule DNA amplicons) having a uracil or thymidine as determined by a quantitation method. Non-limiting examples of quantitation methods include sequencing and microarray methods.

[0090] In embodiments, the method of detecting methylation or unmethylation of a thyroid nodule DNA is based on the level of uracil as set forth Table 3, in which the uracil level above the threshold identifies the thyroid nodule as a benign thyroid nodule. In embodiments, the method of detecting methylation or unmethylation of a thyroid nodule DNA is based on a level of thymidine indicated in Table 3, in which the thymidine level above the threshold identifies the thyroid nodule as a benign thyroid nodule. In embodiments, the level is the proportion of molecules (e.g., in a plurality of reacted thyroid nodule DNA molecules or a plurality of reacted thyroid nodule DNA amplicons) having a uracil or thymidine as determined by a quantitation method.

[0091] In embodiments, the method of detecting methylation or unmethylation of a thyroid nodule DNA is based on the level of uracil as set forth Table 4, in which the uracil level below the threshold identifies the thyroid nodule as a benign thyroid nodule. In embodiments, the method of detecting methylation or unmethylation of a thyroid nodule DNA is based on a level of thymidine indicated in Table 4, in which the thymidine level below the threshold identifies the thyroid nodule as a benign thyroid nodule. In embodiments, the level is the proportion of molecules (e.g., in a plurality of reacted thyroid nodule DNA molecules or a plurality of reacted thyroid nodule DNA amplicons) having a uracil or thymidine as determined by a quantitation method.

[0092] In embodiments, the thyroid nodule is a specimen obtained by biopsy or by surgical resection of a subject.

[0093] In embodiments, the subject has undergone thyroid surgery, radiation therapy, radioactive iodine therapy, chemotherapy, thyroid hormone therapy, and administration of an active agent before the subject undergoes the method of detecting methylation or unmethylation of a thyroid nodule DNA.

[0094] In embodiments, the method includes a determination of prognosis for local recurrence in thyroid cancer. In embodiments, the method includes determination of prognosis of distant recurrence of thyroid cancer.

[0095] In embodiments, the method of detecting DNA methylation level in DNA of thyroid nodule may lead to changes in therapeutic regimen for treating the subject. In embodiments a subject identified as having thyroid cancer may be treated with tyrosine kinase inhibitors.

[0096] In embodiments, the active agent administered to a subject before or after detecting the level of methylation or unmethylation is: Cabozantinib-S-Malate, Caprelsa® (Vandetanib), Cometriq® (Cabozantinib-S-Malate), Doxorubicin Hydrochloride, Lenvatinib Mesylate, Lenvima® (Lenvatinib Mesylate), Nexavar® (Sorafenib Tosylate), Sorafenib Tosylate, and/or Vandetanib.

### Method of Determining Thyroid Cancer or Risk of Developing Thyroid Cancer

[0097] In an aspect, provided herein is a method of determining a thyroid cancer or risk of developing thyroid cancer in a subject in need thereof. The method involves:
[0098] (i) isolating a thyroid nodule DNA molecule from a thyroid nodule of the subject thereby forming an isolated thyroid nodule DNA molecule;
[0099] (ii) contacting the isolated thyroid nodule DNA molecule with a bisulfite salt (such as sodium bisulfite) thereby forming a reacted thyroid nodule DNA molecule; and
[0100] (iii) detecting the presence or absence of uracil in the reacted thyroid nodule DNA molecule at a methylation site set forth in Table 1; thereby detecting the thyroid cancer in the subject.

[0101] In an aspect, provided herein is a method of detecting a thyroid cancer or risk of developing thyroid cancer in a subject in need thereof, comprising (i) isolating a plurality of thyroid nodule DNA molecules from the thyroid nodule of the subject thereby forming a plurality of isolated thyroid nodule DNA molecules, (ii) contacting the plurality of isolated thyroid nodule DNA molecules with the bisulfite salt thereby forming a plurality of reacted thyroid nodule DNA molecules, (iii) detecting the level of reacted thyroid nodule DNA molecules in the plurality of reacted thyroid nodule DNA molecules having a uracil at a methylation site set forth in Table 1; thereby detecting the thyroid cancer in the subject.

[0102] In an aspect, provided herein is a method of detecting a thyroid cancer or risk of developing thyroid cancer in a subject in need thereof, comprising (i) isolating a plurality of thyroid nodule DNA molecules from the thyroid nodule of the subject thereby forming a plurality of isolated thyroid nodule DNA molecules, (ii) contacting the plurality of isolated thyroid nodule DNA molecules with the bisulfite salt thereby forming a plurality of reacted thyroid nodule DNA molecules, (iii) detecting the presence or absence of uracil in a reacted thyroid nodule DNA molecule at a methylation site set forth in Table 1, thereby detecting methylation or unmethylation of the thyroid nodule DNA molecule of the subject.

[0103] In an aspect, provided herein is a method of detecting a thyroid cancer or risk of developing thyroid cancer in a subject in need thereof. The method includes: (i) isolating a thyroid nodule DNA molecule from a thyroid nodule of the subject thereby forming an isolated thyroid nodule DNA molecule, (ii) contacting the isolated thyroid nodule DNA molecule with a bisulfite salt (such as sodium bisulfite) thereby forming a reacted thyroid nodule DNA molecule, (iii) amplifying the reacted thyroid nodule DNA molecule thereby forming a reacted thyroid nodule DNA amplicon molecule, (iv) detecting the presence or absence of thymidine in a reacted thyroid nodule DNA amplicon molecule at a methylation site set forth in Table 1, thereby detecting methylation or unmethylation of the thyroid nodule DNA molecule of the subject. In embodiments, contacting the isolated thyroid nodule DNA with a bisulfite salt comprises adding a solution comprising the bisulfite salt to a solution comprising the isolated single stranded DNA.

[0104] In an aspect, provided herein is a method of detecting a thyroid cancer or risk of developing thyroid cancer in a subject in need thereof, comprising (i) isolating a plurality of thyroid nodule DNA molecules from the thyroid nodule of the subject thereby forming a plurality of isolated thyroid nodule DNA molecules, (ii) contacting the plurality of isolated thyroid nodule DNA molecules with the bisulfite salt thereby forming a plurality of reacted thyroid nodule DNA molecules, (iii) amplifying the plurality of reacted thyroid nodule DNA molecules thereby forming a plurality of reacted thyroid nodule DNA amplicon molecules, (iv) detecting one or more thyroid nodule DNA amplicon molecules within the plurality of reacted thyroid nodule DNA amplicon molecules having a thymidine at a methylation site set forth in Table 1, thereby detecting methylation or unmethylation of the thyroid nodule DNA molecule of the subject.

[0105] In embodiments, detecting one or more thyroid nodule DNA amplicon molecules comprises detecting the level of one or more one or more thyroid nodule DNA amplicon molecules. In embodiments, detecting one or more thyroid nodule DNA amplicon molecules comprises detecting the level of reacted thyroid nodule DNA amplicon molecules in the plurality of reacted thyroid nodule DNA amplicon molecules having a thymidine at a methylation site set forth in Table 1, thereby detecting the level of methylation or unmethylation in the plurality of thyroid nodule DNA molecules of the subject.

[0106] In embodiments, detecting a level includes determining the number (e.g. quantitating) or molecules having, e.g., a thymidine or a uracil. In embodiments, detecting a level includes detecting the portion or proportion of a population or plurality of molecules having, e.g., a thymidine or a uracil.

[0107] In embodiments, contacting the isolated thyroid nodule DNA with a bisulfite salt comprises adding a solution comprising the bisulfite salt to a solution comprising the isolated thyroid nodule DNA.

[0108] In embodiments, the method of determining a thyroid cancer or risk of developing thyroid cancer in a subject in need thereof includes selecting a subject that has or is at risk for developing thyroid cancer. In embodiments, the subject (a) is a woman; (b) is about 20 to about 55 years old; (c) has a mutated Ret Proto-Oncogene; (d) has a grandparent, parent, or sibling who has been diagnosed with thyroid cancer; (e) self-identifies as being Caucasian or Asian; and/or (f) has or has had breast cancer.

[0109] In embodiments, the method includes detecting methylation or unmethylation at a plurality of methylation sites set forth in Table 1. In embodiments, the plurality of methylation sites comprises at least about 2, 3, 4, 5, 10, 25, 50, 75, 80, 85, 90, 100, 150, 200, 250, 300, 350, 400, 450, 500, or 550, or 5-550 methylation sites. In embodiments, the plurality of methylation sites comprises less than about 550, 500, 450, 400, 350, 300, 250, 200, 150, 100, 90, 85, 80, 75, 50, 25, or 10 methylation sites. In embodiments, the plurality of methylation sites is about 5, 6, 7, 8, 9, 10, 11, 12, 13, 14, 15, 16, 17, 18, 19, 20, 25, 50, 75, 80, 85, 90, 100, 150, 200, 250, 300, 350, 400, 450, 500, or 550, or 5-550 methylation sites. In embodiments, the plurality of methylation sites includes two or more methylation sites set forth in Table 1 and no other methylation sites.

[0110] In embodiments, a method provided herein is practiced for a subject more than once over time. In embodiments, methylation or unmethylation of thyroid nodule DNA from a subject is assessed using a method provided herein at least 1, 2, 3, 4, 5, 6, 7, 8, 9, 10 or more times. In embodiments, the method is repeated at least once every 4, 6, 8, 12 or 18 months, or at least once every 2, 3, 4, or 5 more years.

[0111] In embodiments, the method of determining a thyroid cancer or risk of developing thyroid cancer in a subject in need thereof includes determining alteration in methylation at a plurality of methylation sites set forth in Table 1. In embodiments, the method comprises: (i) isolating DNA from multiple cells of a thyroid nodule of the subject thereby forming a plurality of isolated thyroid nodule DNA molecules, (ii) contacting the plurality of isolated thyroid nodule DNA molecules with a bisulfite salt thereby forming a plurality of reacted thyroid nodule DNA molecules, (iii) detecting the proportion of DNA molecules in the plurality of reacted thyroid nodule DNA molecules having a uracil at a methylation site set forth in Table 1.

[0112] In embodiments, the method of determining a thyroid cancer or risk of developing thyroid cancer in a subject in need thereof includes alteration, i.e., increase or loss of uracil level at plurality of methylation sites. In embodiments, the method of determining a thyroid cancer or risk of developing thyroid cancer in a subject in need thereof includes alteration, i.e., increase or loss of thymidine level at plurality of methylation sites.

[0113] In embodiments, the method of determining a thyroid cancer or risk of developing thyroid cancer in a subject in need thereof includes determining a uracil level which is above a threshold as set forth in Table 2. In embodiments, the method of determining a thyroid cancer or risk of developing thyroid cancer in a subject in need thereof includes determining a thymidine level which is above a threshold indicated in Table 2. In embodiments, the level is the proportion of molecules (e.g., in a plurality of reacted thyroid nodule DNA molecules or a plurality of reacted thyroid nodule DNA amplicons) having a uracil or thymidine as determined by a quantitation method.

[0114] In embodiments, the method of determining a thyroid cancer or risk of developing thyroid cancer in a subject in need thereof includes determining a uracil level which is above a threshold as set forth in Table 3. In embodiments, the method of determining a thyroid cancer or risk of developing thyroid cancer in a subject in need thereof includes determining a thymidine level which is above a threshold indicated in Table 3. In embodiments, the level is the proportion of molecules (e.g., in a plurality of reacted thyroid nodule DNA molecules or a plurality of reacted thyroid nodule DNA amplicons) having a uracil or thymidine as determined by a quantitation method.

[0115] In embodiments, the method of determining a thyroid cancer or risk of developing thyroid cancer in a subject in need thereof includes determining a uracil level which is below a threshold as set forth in Table 4. In embodiments, the method of determining a thyroid cancer or risk of developing thyroid cancer in a subject in need thereof includes determining a thymidine level which is below a threshold indicated in Table 4. In embodiments, the level is the proportion of molecules (e.g., in a plurality of reacted thyroid nodule DNA molecules or a plurality of reacted thyroid nodule DNA amplicons) having a uracil or thymidine as determined by a quantitation method.

[0116] In embodiments, the method of determining a thyroid cancer or risk of developing thyroid cancer involves a candidate thyroid cancer patient. In embodiments, the subject is suspected of having thyroid cancer. In embodiments, the subject has thyroid cancer.

[0117] In embodiments, the method of determining a thyroid cancer or risk of developing thyroid cancer in a subject in need thereof includes determining a uracil level in which a threshold above the threshold set forth in Table 2 identifies the thyroid nodule as a cancerous thyroid nodule. In embodiments, the method of determining a thyroid cancer or risk of developing thyroid cancer in a subject in need thereof includes determining a thymidine level in which a threshold above the threshold indicated in Table 2 identifies the thyroid nodule as a cancerous thyroid nodule. In embodiments, the level is the proportion of molecules (e.g., in a plurality of reacted thyroid nodule DNA molecules or a plurality of reacted thyroid nodule DNA amplicons) having a uracil or thymidine as determined by a quantitation method.

[0118] In embodiments, the method of determining a thyroid cancer or risk of developing thyroid cancer in a subject in need thereof includes determining a uracil level in which a threshold above the threshold set forth in Table 3 identifies the thyroid nodule as a benign thyroid nodule. In embodiments, the method of determining a thyroid cancer or risk of developing thyroid cancer in a subject in need thereof includes determining a thymidine level in which a threshold above the threshold indicated in Table 3 identifies the thyroid nodule as a benign thyroid nodule. In embodiments, the level is the proportion of molecules (e.g., in a plurality of reacted thyroid nodule DNA molecules or a plurality of reacted thyroid nodule DNA amplicons) having a uracil or thymidine as determined by a quantitation method.

[0119] In embodiments, the method of determining a thyroid cancer or risk of developing thyroid cancer in a subject in need thereof includes determining a uracil level in which a threshold below the threshold set forth in Table 4 identifies the thyroid nodule as a benign thyroid nodule. In embodiments, the method of determining a thyroid cancer or risk of developing thyroid cancer in a subject in need thereof includes determining a thymidine level in which a threshold below the threshold indicated in Table 4 identifies the thyroid nodule as a benign thyroid nodule. In embodiments, the level is the proportion of molecules (e.g., in a plurality of reacted thyroid nodule DNA molecules or a plurality of reacted thyroid nodule DNA amplicons) having a uracil or thymidine as determined by a quantitation method.

[0120] In embodiments, the method of determining a thyroid cancer or risk of developing thyroid cancer in a subject in need thereof includes determining a uracil level in DNA of a thyroid nodule specimen obtained by biopsy or by surgical resection of a subject. In embodiments, the method of determining a thyroid cancer or risk of developing thyroid cancer in a subject in need thereof includes determining a thymidine level in DNA of a thyroid nodule specimen obtained by biopsy or by surgical resection of a subject.

[0121] In embodiments, the method of determining a thyroid cancer or risk of developing thyroid cancer is of a subject who has previously undergone thyroid surgery, radiation therapy, radioactive iodine therapy, chemotherapy, thyroid hormone therapy, and/or administration of an active agent, before the determination.

[0122] In embodiments, a subject having thyroid cancer or at risk of developing thyroid cancer was administered an active agent: Cabozantinib-S-Malate, Caprelsa (Vandetanib), Cometriq (Cabozantinib-S-Malate), Doxorubicin Hydrochloride, Lenvatinib Mesylate, Lenvima (Lenvatinib Mesylate), Nexavar (Sorafenib Tosylate), Sorafenib Tosylate, and/or Vandetanib.

[0123] In embodiments, the method of determining a thyroid cancer may lead to changes in therapeutic regimen for treating the subject. In embodiments a subject identified as having thyroid cancer may be treated with tyrosine kinase inhibitors. In embodiments, a subject identified as having thyroid cancer or being at risk of developing thyroid cancer according to a method disclosed herein is advised and/or directed to receive additional screening and/or treatment for thyroid cancer.

[0124] In embodiments, the active agent administered to a subject after determining thyroid cancer is: Cabozantinib-S-Malate, Caprelsa (Vandetanib), Cometriq (Cabozantinib-S-Malate), Doxorubicin Hydrochloride, Lenvatinib Mesylate, Lenvima (Lenvatinib Mesylate), Nexavar (Sorafenib Tosylate), Sorafenib Tosylate, and/or Vandetanib.

### Method of Treating Thyroid Cancer

[0125] Also provided herein is a method of treating thyroid cancer in a subject by administering to the subject an active agent for treating thyroid cancer, in which the subject is identified for treatment by a method including isolating a thyroid nodule DNA molecule from a thyroid nodule of the subject thereby forming an isolated thyroid nodule DNA molecule; contacting the isolated thyroid nodule DNA molecule with a bisulfite salt (such as sodium bisulfite) thereby forming a reacted thyroid nodule DNA molecule; and detecting the presence or absence of uracil in the reacted thyroid nodule DNA molecule at a methylation site set forth in Table 1; thereby detecting the thyroid cancer in the subject. In embodiments, contacting the isolated thyroid nodule DNA with a bisulfite salt comprises adding a solution comprising the bisulfite salt to a solution comprising the isolated thyroid nodule DNA.

[0126] In embodiments, the method includes detecting methylation or unmethylation at a plurality of methylation sites set forth in Table 1. In embodiments, the plurality of methylation sites comprises at least about 2, 3, 4, 5, 10, 25, 50, 75, 80, 85, 90, 100, 150, 200, 250, 300, 350, 400, 450, 500, or 550, or 5-550 methylation sites. In embodiments, the plurality of methylation sites comprises less than about 550, 500, 450, 400, 350, 300, 250, 200, 150, 100, 90, 85, 80, 75, 50, 25, or 10 methylation sites. In embodiments, the plurality of methylation sites is about 5, 6, 7, 8, 9, 10, 11, 12, 13, 14, 15, 16, 17, 18, 19, 20, 25, 50, 75, 80, 85, 90, 100, 150, 200, 250, 300, 350, 400, 450, 500, or 550, or 5-550 methylation sites. In embodiments, the plurality of methylation sites includes two or more methylation sites set forth in Table 1 and no other methylation sites.

[0127] In embodiments, a method provided herein is practiced for a subject more than once over time. In embodiments, methylation or unmethylation of thyroid nodule DNA from a subject is assessed using a method provided herein at least 1, 2, 3, 4, 5, 6, 7, 8, 9, 10 or more times. In embodiments, the method is repeated at least once every 4, 6, 8, 12 or 18 months, or at least once every 2, 3, 4, or 5 more years.

[0128] In embodiments, the method of treating a thyroid cancer in a subject in need thereof includes determining alteration in methylation at a plurality of methylation sites set forth in Table 1.

[0129] In embodiments, the method of treating a thyroid cancer in a subject in need thereof includes alteration which includes increase or loss of uracil level at plurality of methylation sites.

[0130] In embodiments, the method of treating a thyroid cancer in a subject in need thereof includes determining a uracil level which is above a threshold as set forth in Table 2. In embodiments, the method of treating a thyroid cancer in a subject in need thereof includes determining a thymidine level which is above a threshold indicated in Table 2. In embodiments, the level is the proportion of molecules (e.g., in a plurality of reacted thyroid nodule DNA molecules or a plurality of reacted thyroid nodule DNA amplicons) having a uracil or thymidine as determined by a quantitation method.

[0131] In embodiments, the method of treating a thyroid cancer in a subject in need thereof includes determining a uracil level which is above a threshold as set forth in Table 3. In embodiments, the method of treating a thyroid cancer in a subject in need thereof includes determining a thymidine level which is above a threshold indicated in Table 3. In embodiments, the level is the proportion of molecules (e.g., in a plurality of reacted thyroid nodule DNA molecules or a plurality of reacted thyroid nodule DNA amplicons) having a uracil or thymidine as determined by a quantitation method.

[0132] In embodiments, the method of treating a thyroid cancer in a subject in need thereof includes determining a uracil level which is below a threshold as set forth in Table 4. In embodiments, the method of treating a thyroid cancer in a subject in need thereof includes determining a thymidine level which is below a threshold indicated in Table 4. In embodiments, the level is the proportion of molecules (e.g., in a plurality of reacted thyroid nodule DNA molecules or a plurality of reacted thyroid nodule DNA amplicons) having a uracil or thymidine as determined by a quantitation method.

[0133] In embodiments, the method of treating a thyroid cancer is in a subject who has undergone surgery, radiation therapy, radioactive iodine therapy, chemotherapy, or thyroid hormone therapy, before the detecting thyroid cancer.

[0134] In embodiments, an active agent administered to a subject for treating thyroid cancer: Cabozantinib-S-Malate, Caprelsa (Vandetanib), Cometriq (Cabozantinib-S-Malate), Doxorubicin Hydrochloride, Lenvatinib Mesylate, Lenvima (Lenvatinib Mesylate), Nexavar (Sorafenib Tosylate), Sorafenib Tosylate, and/or Vandetanib.

[0135] In embodiments, the subject has or is at risk of papillary thyroid cancer, follicular thyroid cancer, medullary thyroid cancer, or anaplastic thyroid cancer.

[0136] In embodiments, the method includes determining a papillary thyroid carcinoma (PTC) methylation alteration score for the subject, wherein the PTC methylation alteration score is equal to the number of methylation sites in Table 1 having a uracil level equal to or greater than the corresponding threshold level set forth in Table 2.

[0137] In embodiments, the method includes determining a PTC methylation alteration score for the subject, wherein the PTC methylation alteration score is equal to the number of methylation sites in Table 1 having a thymidine level equal to or greater than the corresponding threshold level set forth in Table 2.

[0138] In embodiments, the method includes determining a benign thyroid nodule (BTN) methylation alteration score for said subject, wherein the BTN methylation alteration score is equal to: (a) the number of methylation sites in Table 1 having a uracil level equal to or greater than the corresponding threshold level set forth in Table 3; (b) the number of methylation sites in Table 1 having a uracil level equal to or less than the corresponding threshold level set forth in Table 4; or (c) the number of methylation sites in Table 1 having a uracil level equal to or greater than the corresponding threshold level set forth in Table 3 plus the number of methylation sites in Table 1 having a uracil level equal to or less than the corresponding threshold level set forth in Table 4.

[0139] In embodiments, the method includes determining a benign thyroid nodule (BTN) methylation alteration score for said subject, wherein the BTN methylation alteration score is equal to: (a) the number of methylation sites in Table 1 having a thymidine level equal to or greater than the corresponding threshold level set forth in Table 3; (b) the number of methylation sites in Table 1 having a thymidine level equal to or less than the corresponding threshold level set forth in Table 4; or (c) the number of methylation sites in Table 1 having a thymidine level equal to or greater than the corresponding threshold level set forth in Table 3 plus the number of methylation sites in Table 1 having a thymidine level equal to or less than the corresponding threshold level set forth in Table 4.

[0140] In embodiments, the method comprises calculating a Composite Cancer Risk Score for the subject. In embodiments, the Composite Cancer Risk Score for the subject equals: [the PTC methylation alteration score for said subject]/[BTN methylation alteration score for said subject]. In embodiments, the Composite Cancer Risk Score for the subject equals: [(the PTC methylation alteration score for said subject)+1]/[(BTN methylation alteration score for said subject)+1].

[0141] In embodiments, the subject is identified as being at risk of developing thyroid cancer or diagnosed as having thyroid cancer if (a) the PTC methylation alteration score for the subject is at least 5, 6, 7, 8, 9, or 10; (b) the BTN methylation alteration score for the subject is at least 5, 6, 7, 8, 9, or 10; and/or (c) the Composite Cancer Risk Score for the subject is at least about 2, 2.1, 2.2, 2.3, 2.4, 2.5, 2.6, 2.7, 2.8, 2.9, or 3.0.

[0142] In embodiments, the subject receives treatment (e.g., is directed or advised to receive treatment) for thyroid cancer or is directed to receive additional screening for thyroid cancer if (a) the PTC methylation alteration score for the subject is at least 5, 6, 7, 8, 9, or 10; (b) the BTN methylation alteration score for the subject is at least 5, 6, 7, 8, 9, or 10; and/or (c) the Composite Cancer Risk Score for the subject is at least about 2, 2.1, 2.2, 2.3, 2.4, 2.5, 2.6, 2.7, 2.8, 2.9, or 3.0.

### Target Sites for Methylation Level of Thyroid Nodule

[0143] In another aspect, provided herein is a deoxyribonucleic acid 5 to 100, 5 to 300, 5 to 300, or at least about 5, 50, 100, 150, 200, 250, 300, or more nucleotides in length including a uracil-containing sequence identical to the sequence of at least 5 contiguous nucleotides within a sequence including SEQ ID NO:1 to SEQ ID NO:550.

[0144] SEQ ID NO:1 to SEQ ID NO:500 are 300 bp length sequences that include the target sites (i.e., methylation sites of interest). The sequences provided are as modified after bisulfite conversion. Therefore “C” in the non-CpG context becomes “U”, and C in the CpG context is designated as R or X (either “U” either “C”), where X is the target site. The DNA strands (sense and antisense) are no longer complementary after bisulfite conversion. Therefore, each DNA strand is identified with its unique sequence, and is designated as “forward” and “reverse” respectively, in Table 1.

[0145] The sequences listed in Table 1 are provided below with their respective sequence identification number.

| SEQ | |
|---|---|
| ID | |
| NO: | Sequence |
| 1 | TUUTTAGUUUTURGTGGRGUUAGAGTTGGTTGUUTUAGTAGRGRGTGUUUAUURGG |
| | UUUAAAGUTGTTUTGUAGUTGGTUAUTGTGGGAGAAGAGAUTGGAAAAGTTUAAAG |
| | GTGGAGAGGRGGUAGRGATUTGGAGUAUTTTTURGUAXGUTGTAAUUUUTGAGAAG |
| | AAAUAAAGAGGAAARGAGGUTGTTTAGATAATUURGGGUUUTGGTGUTTGUATTTA |
| | GAAAAATTAGGUUUTUTGAAAAATTAUAGAATTATGUTGUUAGTGTUAGGTTUUU |
| | AGATAATGATGTGTUTGTGT |
| 2 | UAUAGAUAUATUATTATUTGGGAAUUTGAUAUTGGUAGUATAATTUTGTAATTTTT |
| | UAAGAGGGUUTAATTTTTUTAAATGUAAGUAUUAGGGUURGGGATTATUTAAAUAG |
| | UUTRGTTTUUTUTTTGTTTUTTUTUAGGGGTTAUAGXGTGRGGAAAAGTGUTUUAGA |
| | TRGUTGURGUUTUTUUAUUTTTGAAUTTTTUUAGTUTUTTUTUUUAUAGTGAUUAGU |
| | TGUAGAAUAGUTTTGGGURGGGTGGGUARGRGUTAUTGAGGUAAUUAAUTUTGGRG |
| | UUARGGAGGGUTAAGGAU |
| 3 | GGGTGAUUAGTGUUAUTAAAAGUAGAGUTTGAGTTTAUTUTUATAAUUATRGGUTG |
| | TGGGUUAGAUATTTGGUTGUTTTGUAGGUAGAUUAGGUTTUURGGTGAGTUATGUT |
| | GUTTAAAATGUTGTUTGGGAARGUAGAGAAAGTUTAAAXGUUAAGARGUTGAGGA |
| | UAGUUURGUAGGTGGAUTGUUATGUURGGUTRGGUUUUTTTTTGGTUUUUAGAGTG |
| | GAUUUTTUTUUTUUUUAUAGAGGGGAGGUATUTGATGGTGGUTTUAGUAGAUAAU |
| | UTGGAGAAGAAUUAUTUAGGGT |
| 4 | AUUUTGAGTGGTTUTTUTUUAGGTTGTUTGUTGAAGUAUUATUAGATGUUTUUUU |
| | TUTGTGGGGAGGAGAAGGGTUUAUTUTGGGGAUUAAAAAGGGGURGAGURGGGUA |
| | TGGUAGTUUAUUTGRGGGGUTGTUUTUAGRGTUTTGGXGTTTAGAUTTTUTUTGRGT |
| | TUUUAGAUAGUATTTAAGUAGUATGAUTUAURGGGAAGUUTGGTUTGUUTGUAAA |
| | GUAGUUAAATGTUTGGUUUAUAGURGATGGTTATGAGAGTAAAUTUAAGUTUTGUT |
| | TTTAGTGGUAUTGGTUAUUU |
| 5 | CAGUTGGGGAGGGGAUAGGGTAGGTGGUTGUAGAAGGGGGUTGGGTTGAGGTUTU |
| | AGGTGUAGARGAGGAGGGGUTGGGRGGAGGGGGTGAGGAGGGGAGURGGGUTGGG |
| | GGURGGGRGRGUTGUTGGGGTUUUUUTUURGUUURGGGAUXGTURGUTUTTGUUUA |
| | GAUURGTRGGTAAAUAGARGURGTGATGTUARGGGRGURGUTGAUUTGTGGUTGAA |
| | UURGGAGUTGTAAATGAGATGUAAGGTGUUAGUAGUUTURGGURGUAGGGUUTAR |
| | GAGUUAUARGRGUTUUTURGURGG |
| 6 | URGGRGGAGGAGRGRGTGTGGUTRGTAGGUUUTGRGGURGGAGGUTGUTGGUAUUT |
| | TGUATUTUATTTAUAGUTURGGGTTUAGUUAUAGGTUAGRGGRGUURGTGAUATUA |
| | RGGRGTUTGTTTAURGARGGGTUTGGGUAAGAGRGGAXGGTUURGGGGRGGGAGGG |
| | GGAUUUUAGUAGRGUUURGGUUUUUAGUURGGUTUUUUTUUTUAUUUUUTURGUU |
| | UAGUUUUTUUTRGTUTGUAUUTGAGAUUTUAAUUUAGUUUUUTTUTGUAGUUAUU |
| | TAUUUTGTUUUUTUUUUAGUTG |
| 7 | TTTTUTGTAAAATGGGGURGUUUAUAAAAUTUATAAUAAAGTGTTGAGGTTURGAU |
| | AAGURGAAAUUTGTGAAAAGUTTGTGTAAAUUTUAGAGUTGTAUATGGATGGTTGA |
| | AGGATUTATTTRGAUAGUTURGGGGAGUXGTGGGAGGGAAGUTGAXGGXGGUTUTT |
| | GUTGTTUTUUTAUUTUUUAGUUUTUURGAAGAUTUTGAGUAGUUTGGAGATUAAAG |
| | GTGATTGGGGUUTGUTGGUATGGAGGURGGGUTRGGUAGAAUUTGUTTUURGGUUU |
| | UUTGUUUAUUTUUUAUUUAU |
| 8 | GTGGGTGGGAGGTGGGUAGGGGGURGGGAAGUAGGTTUTGURGAGUURGGUUTUU |
| | ATGUUAGUAGGUUUUAATUAUUTTTGATUTUUAGGUTGUTUAGAGTUTTRGGGAGG |
| | GUTGGGAGGTAGGAGAAUAGUAAGAGUXGUXGTUAGUTTUUUTUUUAXGGUTUUU |
| | RGGAGUTGTRGAAATAGATUUTTUAAUUATUUATGTAUAGUTUTGAGGTTTAUAUA |
| | AGUTTTTUAUAGGTTTRGGUTTGTRGGAAUUTUAAUAUTTGTTATGAGTTTTGTGG |
| | GRGGUUUUATTTTAUAGAAAA |
| 9 | TGAGUAGTGTTTUAGRGUUUAGAGAGAUAUTGTGGAGAAGGTUUAUUAGGATGUU |
| | TAUUTGUUTTAUAUAAGAGUUTAAUTTTGGUAUAUUTGTGGUAUAUUTGTGGAGAG |
| | UTGTTUTGGUUURGGTTGTUTGGUAGGUUTGGGUTAUTUXGAGUAGGGGAAUTGGG |
| | GUAUAGTGGUTGUAUUTURGGUTATAUUUTGGTTTTTUUAGTTUUTGATGUURGUU |
| | UUTUAGGTGGUAGUATGAGGTGAUTUAGGGAUAGARGUUUTTATRGTGARGUAAGT |
| | UUAGUUUUUAGTGGAGUUUUT |
| 10 | AGGGGUTUUAUTGGGGGUTGGAUTTGRGTUARGATAAGGGRGTUTGTUUUTGAGTU |
| | AUUTUATGUTGUUAUUTGAGGGGRGGGUATUAGGAAUTGGAAAAAUUAGGGTATA |
| | GURGGAGGTGUAGUUAUTGTGUUUUAGTTUUUUTGUTXGGAGTAGUUUAGGUUTG |
| | UUAGAUAAURGGGGUUAGAAUAGUTUTUUAUAGGTGTGUUAUAGGTGTGUUAAAG |
| | TTAGGUTUTTGTGTAAGGUAGGTAGGUATUUTGGTGGAUUTTUTUUAUAGTGTUTUT |
| | UTGGGRGUTGAAAUAUTGUTUA |
| 11 | TUTTGTAAAATTUUAGAGUUAGGTATAUUUAATrUTGUAARGTGGTAGUTGUATGA |
| | UTGTAUAAGTUUUTTAAUAGUAURGGGUUTUAGTGAUATUATUTGTTAAATGGGTT |
| | GGTGATGATAATGGTUAGUATTTATGGAGGAGUUUAUAXGGTGUTAAGTGUTTrAU |
| | AUATATUAGUTAAUTGAATUUTUAUTGUTGUUAATGAGAUAGGTAUTATTGAATUA |
| | GAGGUURGGAGAGAGUTUUARGRGGTTGGTUATAUTGGTGAAGAGUTTGGTTUAAT |
| | GUUTGGTGAAUTUTRGGUAU |
| 12 | GTGURGAGAGTTUAUUAGGUATTGAAUUAAGUTUTTUAUUAGTATGAUUAAURGRG |
| | TGGAGUTUTUTURGGGUUTUTGATTUAATAGTAUUTGTUTUATTGGUAGUAGTGAG |
| | GATTUAGTTAGUTGATATGTGTAAAGUAUTTAGUAUXGTGTGGGUTUUTUUATAAA |
| | TGUTGAUUATTATUATUAUUAAUUUATTTAAUAGATGATGTUAUTGAGGUURGGTG |
| | UTGTTAAGGGAUTTGTAUAGTUATGUAGUTAUUARGTTGUAGAATTGGGTATAUUT |
| | GGUTUTGGAATTTTAUAAGA |
| 13 | TURGGAGUUAGTGAAUTTGTGATURGGAGUUAGTTAAUTTUAUAGUTAATGTGUTG |
| | AGUAGUATTUUAGUUAGRGTUTGAAGUUAGAGUAGGGAGGRGGARGGGUUUUAGG |
| | AGTTRGAGGTURGGGAAGURGAAGUAUUAUUAAAUTGAGXGAGGTTUUAAUTUTU |
| | UUTUUUAGGAGGTURGGUTGUUTUUUAUUAGUAGUUUAAUUAUAGGGTUUTGUTU |
| | UAGARGTTAUTATTTTUTUTTTTTUAGTGTGTUUAGUAGUAAUUTRGAUTGUUAAUA |
| | AUAARGTGAAAAATAAUTGUAG |
| 14 | UTGUAGTTATTTTTUARGTTGTTGTTGGUAGTRGAGGTTGUTGUTGGAUAUAUTGAA |
| | AAAGAGAAAATAGTAARGTUTGGAGUAGGAUUUTGTGGTTGGGUTGUTGGTGGGAG |
| | GUAGURGGAUUTUUTGGGAGGGAGAGTTGGAAUUTXGUTUAGTTTGGTGGTGUTTR |
| | GGUTTUURGGAUUTRGAAUTUUTGGGGUURGTURGUUTUUTGUTUTGGUTTUAGA |
| | RGUTGGUTGGAATGUTGUTUAGUAUATTAGUTGTGAAGTTAAUTGGUTURGGATUA |
| | UAAGTTUAUTGGUTURGGA |
| 15 | TTGUUAAAAUTGGAAGUAAUUAAGATGUUUUTUAAAAGGTGAATGGAGGUUAGGT |
| | GRGGTGGUTUARGURGATAATUUUAGUAUTTTGGGAGGUTGAGGUAGGTGGATUAU |
| | TTGAGATUARGAGTTTGAGAUUAGUURGGUUAAUATGGXGAAAUUURGTUTUTAUT |
| | AAAAATAUTAAGATTAAURGGGRGTGGTGGUARGTGUUTGTTATUUUAGUTAUTTG |
| | GGAAGUTGAGGUAGGUAAATTGUTTGAAUUTGGGAGGTGGAGGTUAUAGTGAGUU |
| | AAGATTGTGUUAUTGUAUTUUA |
| 16 | TGGAGTGUAGTGGUAUAATUTTGGUTUAUTGTGAUUTUUAUUTUUUAGGTTUAAGU |
| | AATTTGUUTGUUTUAGUTTUUUAAGTAGUTGGGATAAUAGGUARGTGUUAUUARGU |
| | URGGTTAATUTTAGTATTTTTAGTAGAGARGGGGTTTXGUUATGTTGGURGGGUTGG |
| | TUTUAAAUTRGTGATUTUAAGTGATUUAUUTGUUTUAGUUTUUUAAAGTGUTGGGA |
| | TTATRGGRGTGAGUUAURGUAUUTGGUUTUUATTUAUUTTTTGAGGGGUATUTTGGT |
| | TGUTTUUAGTTTTGGUAA |
| 17 | GGRGGGATURGAGURGAGAUARGTGUTGGAGRGGAGURGUTTUUTUARGGTRGUUA |
| | GURGUAGAUAAUTGAUUTUUURGGUATRGRGTTRGRGGUUUTGUTGUTGGUTURGG |
| | TGTUTRGGGURGGAAUTUUTGTGGUTUUAGRGTTRGXGURGGUUAUTGGUUAGRGU |
| | TTGGGUUTRGUUUTGUAGUTURGGGGUUATAGGGUAUAGUTTTAGUTTTGAUUTUU |
| | URGTTUURGAAAGGARGUUUAAGGRGAUUTUUUAUUUUATUUTUUUUAAUTTUTU |
| | UUUUATGTUUTGRGGUAAUTT |
| 18 | AGTTGURGUAGGAUATGGGGGAGAAGTTGGGGAGGATGGGGTGGGAGGTRGUUTTG |
| | GGRGTUUTTTRGGGAARGGGGAGGTUAAAGUTAAAGUTGTGUUUTATGGUUURGGA |
| | GUTGUAGGGRGAGGUUUAAGRGUTGGUUAGTGGURGGXGRGAARGUTGGAGUUAU |
| | AGGAGTTURGGUURGAGAUAURGGAGUUAGUAGUAGGGURGRGAARGRGATGURG |
| | GGGAGGTUAGTTGTUTGRGGUTGGRGAURGTGAGGAAGRGGUTURGUTUUAGUARG |
| | TGTUTRGGUTRGGATUURGUUU |
| 19 | UUAGUAGGGAAGGUAGUUAAUAGATGUAGAUTRGUTUTGUUTAUUTGTGGAGGUR |
| | GGTGAGGUUAGGGUUTGTTGGGAUTTGAAAUAGTGAGGUAAGTGGGTGTGTGGTGU |
| | TGGGUTUUUXGUTUAAGTTUTUUUAGXGTGUUAGTTUURGGAGUUTTATGTGUAGG |
| | GTGTTGGGGAAGGGXGGGUTGAATRGTGGGTGGGAGTUTTGGUTUAAAGUUUUAGG |
| | TGAGTGGAGGAATTGGGGGRGGAUUTGAAGTAUTGTUTTGAAGTGGAUUTGGUAGG |
| | UUTUTTGGGUTTGTGUAGUTG |
| 20 | UAGUTGUAUAAGUUUAAGAGGUUTGUUAGGTLTUAUTTUAAGAUAGTAUTTUAGGT |
| | URGUUUUUAATTUUTUUAUTUAUUTGGGGUTTTGAGUUAAGAUTUITUAUUUARGAT |
| | TUAGUUXGUUUTTUUUUAAUAUUUTGUAUATAAGGUTURGGGAAUTGGUAXGUTG |
| | GGAGAAUTTGAGXGGGGAGUUUAGUAUUAUAUAUUUAUTTGUUTUAUTGTTTUAA |
| | GTUUUAAUAGGUUUTGGUUTUAURGGUUTUUAUAGGTAGGUAGAGRGAGTUTGUA |
| | TUTGTTGGUTGUUTTUUUTGUTGG |
| 21 | UUAGAUTRGUUUTUUUUAUURGGGUUTRGGAUTTTUAUUUUAGUTTUTUTUTUUTG |
| | GUUAGTGATTAUUUAUUUUUAATUUUAUUURGUUURGURGRGUAAUTAUUTUUTU |
| | UUTTUAUURGGAUTGGGAUUATUATUUUUAUTUUAUTUXGUUUAGTUTGGGAUTU |
| | UAUUTGUUTUUTUUUUAATUUUAUAUTAATUTUTGUTTGGTUTUTTUUTUTTTGGUU |
| | TAATUTUTRGTUTRGGUTTATTGGGGARGGUUAUTUTUAUAGTTTGGTTUUAAAUAU |
| | UAGTTUUTGGATGGATTUUU |
| 22 | GGGAATUUATUUAGGAAUTGGTGTTTGGAAUUAAAUTGTGAGAGTGGURGTUUUUA |
| | ATAAGURGAGARGAGAGATTAGGUUAAAGAGGAAGAGAUUAAGUAGAGATTAGTG |
| | TGGGATTGGGGAGGAGGUAGGTGGAGTUUUAGAUTGGGXGGAGTGGAGTGGGGAT |
| | GATGGTUUUAGTURGGGTGAAGGGAGGAGGTAGTTGRGRGGRGGGGRGGGGTGGG |
| | ATTGGGGGTGGGTAATUAUTGGUUAGGAGAGAGAAGUTGGGGTGAAAGTURGAGG |
| | UURGGGTGGGGAGGGRGAGTUTGG |
| 23 | RGUAGGUURGRGUUURGUTUURGUUURGUUTGURGRGUUTUURGGGGRGUURGUA |
| | TTAAAGRGUATATGUAAGUUATGAATTATUAAUTGAAAGGAGTUAATTAURGGUTU |
| | TAAAAARGAGTGTUTGRGUTRGUAGRGUUURGGGUUATUXGUUTATTTARGGAGRG |
| | ATUTAUUURGUURGGUTGGGGAGGGGGUUTRGGGAGGGAGAGAGARGGAGAAARG |
| | GAGUURGAGAURGGGAGAGAGURGGAGAGGUAGGGAUTGGAGAGTUTGGGAUARG |
| | AAGGAGAGGRGGGGAGAGAURGA |
| 24 | TRGGTUTUTUUURGUUTUTUUTTRGTGTUUUAGAUTUTUUAGTUUUTGUUTUTURGG |
| | UTUTUTUURGGTUTRGGGUTURGTTTUTURGTUTUTUTUUUTUURGAGGUUUUUTUU |
| | UUAGURGGGRGGGGTAGATRGUTURGTAAATAGGXGGATGGUURGGGGRGUTGRG |
| | AGRGUAGAUAUTRGTTTTTAGAGURGGTAATTGAUTUUTTTUAGTTGATAATTUATG |
| | GUTTGUATATGRGUTTTAATGRGGGRGUUURGGGAGGRGRGGUAGGRGGGGRGGGA |
| | GRGGGGRGRGGGUUTGRG |
| 25 | AUAGTRGUTGUAGGGAGGARGRGGGURGTGAGAAUURGGGGAUAGUUTUUUUTUT |
| | TGRGGTUUTGUAGTUURGGAUUUAUTGGGRGGATUAGAAAGTTTGUAGGGAGUUA |
| | GGGAUTAGGAGAUAGAUAGAUAGRGUAGGGAUAGAGAAAGXGGAGGGATGUUAG |
| | AAAGAURGAGTRGGGGAUAGAUAGAGAGAUUUAGGGTGAGAUAGAGGAAGAGAT |
| | AUURGGGGUTGAAAARGGTGGUAGAAAGTGAGUAAUTTAGGGAGAUAGAAAGAGR |
| | GUAGAAUTRGAAATTURGAGGUAGAGA |
| 26 | TUTUTGUUTRGGAATTTRGAGTTUTGRGUTUTTTUTGTUTUUUTAAGTTGUTUAUTTT |
| | UTGUUAURGTTTTUAGUUURGGGTATUTUTTUUTUTGTUTUAUUUTGGGTUTUTUTG |
| | TUTGTUUURGAUTRGGTUTTTUTGGUATUUUTUXGUTTTUTUTGTUUUTGRGUTGTU |
| | TGTUTGTUTUUTAGTUUUTGGUTUUUTGUAAAUTTTUTGATURGUUUAGTGGGTURG |
| | GGAUTGUAGGAURGUAAGAGGGGAGGUTGTUUURGGGTTUTUARGGUURGRGTUU |
| | TUUUTGUAGRGAUTGT |
| 27 | TUAGUUTGTAUUURGGRGUTGGUUTUUAGAUAGUUAGGTGUTGUUTRGUARGGTUT |
| | TGUTTGUAGGUTGGGGUATGAAGUAUUUTGGTATTTARGUTGGGATTGGTUTUTUA |
| | UTAGGGTTGGGGRGGGUTGTGGTUAUUTGGUURGGRGXGURGUAGAGGUTGGUTUR |
| | GGAGAAGAUUTGGGGGRGUAAGAUTUAGAGGUUAGAGGGTGUAGURGUTGUTGAU |
| | TUATTTGRGGARGGGGRGGUTGGGAGGAGRGUTAGUUUUTGTTGTGAGRGATTTGA |
| | GAGUUAGGGUUAAATUTGGGT |
| 28 | AUUUAGATTTGGUUUTGGUTUTUAAATRGUTUAUAAUAGGGGUTAGRGUTUUTUUU |
| | AGURGUUURGTURGUAAATGAGTUAGUAGRGGUTGUAUUUTUTGGUTUTUTGAGTUT |
| | TGRGUUUUUAGGTUTTUTURGGAGUUAGUUTUTGRGGXGRGURGGGUUAGGTGAU |
| | UAUAGUURGUUUUAAUUUTAGTGAGAGAUUAATUUUAGRGTAAATAUUAGGGTGU |
| | TTUATGUUUUAGUUTGUAAGUAAGAURGTGRGAGGUAGUAUUTGGUTGTUTGGAG |
| | GUUAGRGURGGGGTAUAGGUTGA |
| 29 | GUUUAGUUTUAUAAAGGTGAGTGGGGUAUUUUUAGUTGURGAGUTUUUUTAGTUA |
| | GUAGUUTUATAUUTUAUATTUTUUTGTGGURGUAUUTUAUAGUUURGUUURGGUU |
| | UAUAGGUATUUTTAAGAAGAAGTGTUTGUUUAUUATUAGXGAGAAGAGUAGUUTU |
| | UTGXGGUTUUUUUTGGAGUAATGUAUAGGGTUTTUURGGGGUTUUTURGUTAGTGA |
| | GGGUAGURGGGGAGGUUUUUUTUUURGUUUAURGUUURGGUAGAGUUTUUAGGA |
| | GUAGUTGAARGGGGTUATGUUUATRG |
| 30 | RGATGGGUATGAUUURGTTUAGUTGUTUUTGGAGGUTUTGURGGGGRGGTGGGRGG |
| | GGAGGGGGGUUTUUURGGUTGUUUTUAUTAGRGGAGGAGUUURGGGAAGAUUUTG |
| | TGUATTGUTUUAGGGGGAGUXGUAGGAGGUTGUTUTTUTXGUTGATGGTGGGUAGA |
| | UAUTTUTTUTTAAGGATGUUTGTGGGURGGGGRGGGGUTGTGAGGTGRGGUUAUAG |
| | GAGAATGTGAGGTATGAGGUTGUTGAUTAGGGGAGUTRGGUAGUTGGGGGTGUUU |
| | UAUTUAUUTTTGTGAGGUTGGGU |
| 31 | TUAGAATAATGGUTGGTTTGTAGAGATUAGAAATGUUUAUTGUTGTTTUUTGTAT |
| | UUUTUUAUUUAUUUAGAUTGAGUUTUTGAAGUTGTURGGGGUUTGGAGAGAGAAG |
| | UUAUTUAAGGAUAGUAGUTGUTGAUTUAGAXGUTUAAATTUTXGGGXGGAAAAGG |
| | AUUTTAGAGAATGUUTAAAATRGTGGUUUAATUUUTUATTGGAAGUTGGGGUTURG |
| | AAAAGURGGGGUTURGAAAAGUTGGGAGAGUAGUUUAAAGRGTAUTGUUUAUTAA |
| | ATGTGGATGUARGUTGGAURGU |
| 32 | GRGGTUUAGRGTGUATUUAUATTTAGTGGGUAGTARGUTTTGGGUTGUTUTUUUAG |
| | UTTTTRGGAGUUURGGUTTTTRGGAGUUUUAGUTTUUAATGAGGGATTGGGUUARG |
| | ATTTTAGGUATTUTUTAAGGTUUTTTTUXGUUXGAGAATTTGAGXGTUTGAGTUAGU |
| | AGUTGUTGTUUTTGAGTGGUTTUTUTUTUUAGGUUURGGAUAGUTTUAGAGGUTUA |
| | GTUTGGGTGGGTGGAGGGATAUAGGAAAUAGUAGTGGGUATTTUTGATUTUTAUAA |
| | AUUAGGUUATTATTUTGGA |
| 33 | AAGTTUTGGGGUAGAAGTTGGATAAUUAGGGUUTGAGAAATAAAGATAAGAGGGT |
| | ATATTUUTUUUUUAGGAGAUAAAAGAGAAGGTGGATGGAGAAGGGGAAAUTGGGU |
| | UTUAGUUAGUAURGGGATGATGRGAUUAGUTTTGTUAGUAXGUTTGGGGAGUATAU |
| | AUAURGUTTGUUTTGGUTGGAURGGAGAUTGTGATUAUUAUUUTTUUAAUUUATUU |
| | UUUAAUARGUAGGUTGGUATGGUUARGUUUAUAGTGUUUUAAGTGUTGUUTGUUT |
| | TGUAGTGAUTUAUTTUUTUTGTA |
| 34 | TAUAGAGGAAGTGAGTUAUTGUAAGGUAGGUAGUAUTTGGGGUAUTGTGGGRGTG |
| | GUUATGUUAGUUTGRGTGTTGGGGGATGGGTTGGAAGGGTGGTGATUAUAGTUTUR |
| | GGTUUAGUUAAGGUAAGRGGTGTGTATGUTUUUUAAGXGTGUTGAUAAAGUTGGTR |
| | GUATUATUURGGTGUTGGUTGAGGUUUAGTTTUUUUTTUTUUATUUAUUTTUTUTTT |
| | TGTUTUUTGGGGGAGGAATATAUUUTUTTATUTTTATTTUTUAGGUUUTGGTTATUU |
| | AAUTTUTGUUUUAGAAUTT |
| 35 | TUAGAARGTGUUUAUAUATGUUUATGUUUTUTATUUTGUTGAAATUUAAUUUUUU |
| | UTTUAAAGGUUAUTGUAGGGAGUUTTUUUAGGGUUUAAURGGATTUAGTGTUTAU |
| | UTGTTUTGTUUTGTAUAAAGRGUUUUTTTTGUUUTTTTXGTGTGTAUTTAGAGAATT |
| | UTGATTTTGAUTGAATUAUUTGTGTAUTTGTTTTUTUTUAGUUTUAUUUUUAUATGG |
| | TGAGUTUAURGGTUTTAUTUATTTUTGUATGAGGTAAGGGTUTRGUUUAUAUUAGG |
| | TGUUAAUUAGTGUTTARGGU |
| 36 | URGTAAGUAUTGGTTGGUAUUTGGTGTGGGRGAGAUUUTTAUUTUATGUAGAAATG |
| | AGTAAGAURGGTGAGUTUAUUATGTGGGGGTGAGGUTGAGAGAAAAUAAGTAUAU |
| | AGGTGATTUAGTUAAAATUAGAATTUTUTAAGTAUAUAXGAAAAGGGUAAAAGGG |
| | GRGUTTTGTAUAGGAUAGAAUAGGTAGAUAUTGAATURGGTTGGGUUUTGGGAAGG |
| | UTUUUTGUAGTGGUUTTTGAAGGGGGGGTTGGATTTUAGUAGGATAGAGGGUATGG |
| | GUATGTGTGGGUARGTTUTGAA |
| 37 | UAUUTRGTGUUUUTUAUUTGTAAGUAUTGTGAGGAGUAGUAGUAGGAAGAAAGGA |
| | GAUTGGGTGUURGGTGTUATGGTGGTGGTGAAATGGGTGGGGAGGGGGUAGAAUA |
| | GATTUAGGUAGGRGUTGGUTGUTTGAGAGGTGGAGXGGGUAUAGGXGUUTAURGU |
| | TTTATAURGGTUUUUUUAUTUUURGUURGUURGUUUTAGGUAUAGURGGAGUAGG |
| | TGAUAGGTGAUAAAAUUURGUUUUUTUUUUTAUUTUUTAUUTUTTUUTUUTUUTUU |
| | UUAAUUATTUUTGGGTAGGGTAUA |
| 38 | TGTAUUUTAUUUAGGAATGGTTGGGGAGGAGGAGGAAGAGGTAGGAGGTAGGGGA |
| | GGGGGRGGGGTTTTGTUAUUTGTUAUUTGUTURGGUTGTGUUTAGGGRGGGRGGGR |
| | GGGGAGTGGGGGGAURGGTATAAAGRGGTAGGXGUUTGTGUUXGUTUUAUUTUTU |
| | AAGUAGUUAGRGUUTGUUTGAATUTGTTUTGUUUUUTUUUUAUUUATTTUAUUAUU |
| | AUUATGAUAURGGGUAUUUAGTUTUUTTTUTTUUTGUTGUTGUTAUTUAUAGTGUT |
| | TAUAGGTGAGGGGUARGAGGTG |
| 39 | AGARGGAGAAAUAGAAARGGAGGTUAGGRGGGGAGUUTRGGGGAUAGGUUTGGGA |
| | UURGAGGURGGAAAURGUAGAGGAGRGAAGUUTGGRGGGATGUAGTGATTGGAGU |
| | UAAAGGAAURGTUURGGUUTGTUUAARGRGGGGGGGUUTTXGGUURGGTGGUUUT |
| | GAGRGAAURGATGUARGTGGUUURGURGUATUUUATUUUUUAUUUTUUUUAGAUT |
| | UTUUUTUUUAGUTUUTTUTGAGGRGGAAAGAAAAAUUUTAUATUTGGTUUUAGUU |
| | UTGGGTUUUTGUUUTGGUUUUTUUT |
| 40 | AGGAGGGGUUAGGGUAGGGAUUUAGGGUTGGGAUUAGATGTAGGGTTTTTUTTTUR |
| | GUUTUAGAAGGAGUTGGGAGGGAGAGTUTGGGGAGGGTGGGGGATGGGATGRGGR |
| | GGGGUUARGTGUATRGGTTRGUTUAGGGUUAURGGGUXGAAGGUUUUUURGRGTT |
| | GGAUAGGURGGGARGGTTUUTTTGGUTUUAATUAUTGUATUURGUUAGGUTTRGUT |
| | UUTUTGRGGTTTURGGUUTRGGGTUUUAGGUUTGTUUURGAGGUTUUURGUUTGAU |
| | UTURGTTTUTGTTTUTURGTUT |
| 41 | TUAAAUUUAGGTATTUTGGGTUTAGTRGGTGTTUTTUTGUUAAAGAGTAUTTTGTGG |
| | UTAAATTUAUTGGATGTGAUTUAGTTTTTATUTTTRGTUATUTUTTAGUTTTGUUTTA |
| | TUUAAAURGGATUAUTUTUTTUTGUTTAGAAUTXGTTUTGUTUTTGGTGAUAGTGGT |
| | AUATAUTUTUATAUTGUUTUTTUUUTTGUUUAGAGTUUTTUUTTUTUATGTTUUAUU |
| | TUUTUTAUTGGGAURGGUUTGGGTGTGUTGTUUAATRGGAUAUTATTTTGTTGGGUU |
| | UTUTUUTTUAUTUU |
| 42 | GAGTGAAGGAGAGGGUUUAAUAAAATAGTGTURGATTGGAUAGUAUAUUUAGGUR |
| | GGTUUUAGTAGAGGAGGTGGAAUATGAGAAGGAAGGAUTUTGGGUAAGGGAAGAG |
| | GUAGTATGAGAGTATGTAUUAUTGTUAUUAAGAGUAGAAXGAGTTUTAAGUAGAA |
| | GAGAGTGATURGGTTTGGATAAGGUAAAGUTAAGAGATGARGAAAGATAAAAAUTG |
| | AGTUAUATUUAGTGAATTTAGUUAUAAAGTAUTUTTTGGUAGAAGAAUAURGAUTA |
| | GAUUUAGAATAUUTGGGTTTGAU |
| 43 | AAGTGTUTTTAUUTUUTGAGTGRGAUUUAAGTUAGGAGGUAGGAGGUTGAUTGAGG |
| | GAUARGGAGGAGGTATGUAUAUTUAUAGUATGAGGUAGAGUTGTGTGUAUAUATU |
| | AAGUAAGGAAATGGGGURGGAATATGGGGUAAAGGUUTAXGGATTGAATGGTGGA |
| | TTTGGATGTGGGUUAUTTUTTUUAGUUUUTGAAAGAGGAUUAGGUAATGTGGUTAT |
| | GAATGGGUUTAATGAGAATTGATTGATTRGUTRGAGATGTTTTUTTTTTUTTUUTAAA |
| | ATAGAAAATGAUATAUUUUA |
| 44 | TGGGGTATGTUATTTTUTATTTTAGGAAGAAAAAGAAAAUATUTRGAGRGAATUAAT |
| | UAATTUTUATTAGGUUUATTUATAGUUAUATTGUUTGGTUUTUTTTUAGGGGUTGG |
| | AAGAAGTGGUUUAUATUUAAATUUAUUATTUAATUXGTAGGUUTTTGUUUUATATT |
| | URGGUUUUATTTUUTTGUTTGATGTGTGUAUAUAGUTUTGUUTUATGUTGTGAGTGT |
| | GUATAUUTUUTURGTGTUUUTUAGTUAGUUTUUTGUUTUUTGAUTTGGGTRGUAUT |
| | UAGGAGGTAAAGAUAUTT |
| 45 | GGATGTGUTUAGGUTUUAGGGUUAUAUUUTGUATGTAUTUATAGUAUAGUUUATTU |
| | TGGAAGGTGUAGTAGAGTTTGGGGGUAUAGUTGTGTGUTRGUAGUAGUTGGAAGTT |
| | TUTGAUUTUATTUTUURGGTUUAUUAGUAGUTURGTUXGUTUUUUATAUAUURGGA |
| | UUAGUARGUAGTUUTGUATGTUUTUUTUUAUATAGUAGGUUAUUAGUTTGTTGGTG |
| | ATGUUATURGTGAAGRGUTAGUATGGGGAGAGGAUAGTGRGTGGGTGGGTGGGTGG |
| | GGUAGGATUTUTUTGGTUTU |
| 46 | GAGAUUAGAGAGATUUTGUUUUAUUUAUUUAUUUARGUAUTGTUUTUTUUUUATG |
| | UTAGRGUTTUARGGATGGUATUAUUAAUAAGUTGGTGGUUTGUTATGTGGAGGAGG |
| | AUATGUAGGAUTGRGTGUTGGTURGGGTGTATGGGGAGXGGARGGAGUTGUTGGTG |
| | GAURGGGAGAATGAGGTUAGAAAUTTUUAGUTGUTGRGAGUAUAUAGUTGTGUUU |
| | UUAAAUTUTAUTGUAUUTTUUAGAATGGGUTGTGUTATGAGTAUATGUAGGGTGTG |
| | GUUUTGGAGUUTGAGUAUATUU |
| 47 | AGUUAGGAAGGGUTGUAUTTUUUUAGTGGTUAGRGUAGGUTGGRGTUUTGGUTGUT |
| | GGRGUAAGTUTUAAGUTGUUUUTUUUUTTUTAGUAAGUATGGGRGGTGTGGGTATG |
| | RGGGGTGUTGGGTAUTGAUTUAUUTURGGAGAUUAUTXGGUTUUUAUAUAUUAUU |
| | TUTGAATGATUTGAATUATTTATGAGGUTGAATGUUUTGTUUTUUAGGGAGUTUUA |
| | GUTGGAGUTGGAGUUAGUATATGGAGGTGGAGAGAGUTUUXGUAGTUAUURGGGU |
| | UUTGTAUAGUUTGUAGGUAGAAU |
| 48 | GTTUTGUUTGUAGGUTGTAUAGGGUURGGGTGAUTGXGGGAGUTUTUTUUAUUTUU |
| | ATATGUTGGUTUUAGUTUUAGUTGGAGUTUUUTGGAGGAUAGGGUATTUAGUUTUA |
| | TAAATGATTUAGATUATTUAGAGGTGGTGTGTGGGAGUXGAGTGGTUTURGGAGGT |
| | GAGTUAGTAUUUAGUAUUURGUATAUUUAUAURGUUUATGUTTGUTAGAAGGGGA |
| | GGGGUAGUTTGAGAUTTGRGUUAGUAGUUAGGARGUUAGUUTGRGUTGAUUAUTG |
| | GGGAAGTGUAGUUUTTUUTGGUT |
| 49 | GGGTGUTGGGTAUTGAUTUAUUTURGGAGAUUAUTXGGUTUUUAUAUAUUAUUTU |
| | TGAATGATUTGAATUATTTATGAGGUTGAATGUUUTGTUUTUUAGGGAGUTUUAGU |
| | TGGAGUTGGAGUUAGUATATGGAGGTGGAGAGAGUTUUXGUAGTUAUURGGGUUU |
| | TGTAUAGUUTGUAGGUAGAAUUTATAAAUTGGAUTUUTAAAGUUAUTUUTUTUAAG |
| | GUUTGGAGATTUTGUTGAGTTTUAUTUTITGGUTUTUAGAGUATUTGGAAUTUTAUA |
| | TAAAGUTGAGGAAUUUTTTGT |
| 50 | AUAAAGGGTTUUTUAGUTTTATGTAGAGTTUUAGATGUTUTGAGAGUUAAAGAGTG |
| | AAAUTUAGUAGAATUTUUAGGUUTTGAGAGGAGTGGUTTTAGGAGTUUAGTTTATA |
| | GGTTUTGUUTGUAGGUTGTAUAGGGUURGGGTGAUTGXGGGAGUTUTUTUUAUUTU |
| | UATATGUTGGUTUUAGUTUUAGUTGGAGUTUUUTGGAGGAUAGGGUATTUAGUUTU |
| | ATAAATGATTUAGATUATTUAGAGGTGGTGTGTGGGAGUXGAGTGGTUTURGGAGG |
| | TGAGTUAGTAUUUAGUAUUU |
| 51 | AGTUUATGAAGGUAUTTTTTUAAAGTTAGGTGGTUAUUAAAAAAUAGGTAATUAAT |
| | UUTGTUAUUAGURGRGGGGAUAGRGAGGUUTTGGGUTTGGAGGGGGAGGATGURG |
| | ARGATGURGAURGRGUATUAGATUTRGURGGGAGGAGGGXGRGGGRGUTUUAUTTG |
| | TTGUAAAGAARGURGGGTTUUTUTGGGUUATTGGGUTGURGUTURGGRGGGGAGRG |
| | RGGAAGGUTGGGUUTUAGGTAGUTTUAATUATTUAUUTGUTGGTTARGGGTRGRGG |
| | RGURGGGGAUUUTAUTURGGA |
| 52 | TURGGAGTAGGGTUUURGGRGURGRGAUURGTAAUUAGUAGGTGAATGATTGAAGU |
| | TAUUTGAGGUUUAGUUTTURGRGUTUUURGURGGAGRGGUAGUUUAATGGUUUAG |
| | AGGAAUURGGRGTTUTTTGUAAUAAGTGGAGRGUURGXGUUUTUUTUURGGRGAGA |
| | TUTGATGRGRGGTRGGUATRGTRGGUATUUTUUUUUTUUAAGUUUAAGGUUTRGUT |
| | GTUUURGRGGUTGGTGAUAGGATTGATTAUUTGTTTTTTGGTGAUUAUUTAAUTTTG |
| | AAAAAGTGUUTTUATGGAUT |
| 53 | GTUTGUAGUTGGGAATGAATGGAATGAAGGTUAAGGATGAAGTAATAAUUAAATAT |
| | TGGGTTTTGGGTGUUUTGGTAAUTGTURGGTTTUUAGTTAGGGTTUUTGGGTGAUAT |
| | UTTUUTTUTGGGGGAAGAUAGAGTUAAATGAGAAAXGTGAGTTGAGUUUAGGGGA |
| | AAGGATUATURGGGAGATGUUTGAGGGGUTUUAGGGUATRGTAATUTUTTGUTUAG |
| | UTGGUAGAGTGGGGUTGAUARGGUUAGUTGUTUTUTGGAGTUUTRGGUUTTUUTGT |
| | TTUUUUUTGAGGAUTTTGAG |
| 54 | TUAAAGTUUTUAGGGGGAAAUAGGAAGGURGAGGAUTUUAGAGAGUAGUTGGURG |
| | TGTUAGUUUUAUTUTGUUAGUTGAGUAAGAGATTARGATGUUUTGGAGUUUUTUA |
| | GGUATUTUURGGATGATUUTTTUUUUTGGGUTUAAUTUAXGTTTUTUATTTGAUTUT |
| | GTUTTUUUUUAGAAGGAAGATGTUAUUUAGGAAUUUTAAUTGGAAAURGGAUAGT |
| | TAUUAGGGUAUUUAAAAUUUAATATTTGGTTATTAUTTUATUUTTGAUUTTUATTUU |
| | ATTUATTUUUAGUTGUAGAUA |
| 55 | UUAGTGUAGAAUAGGUAUTGUUUAUUATAUAGGUUAGAAGAGGTGUUUTUTUUAU |
| | AUTGGUUAUTGAAAUTAUTUAUTGGUAGUAGTGGGTGUUAUTTGGAAAAUAAGAT |
| | GGUUUTUUUTGUAGAGUAGGUUAUUUTGURGGAGGTGTUUXGATGRGTGTGAAGU |
| | AGGGTTGGAGGUAUAUTAUAGGUAUTUTUTAGTUUTTUAAAUAAUAUTGTAGTGTA |
| | GATUTTGTTGGTTUTTTUAGAGAAGGGGAAARGGAAAUTUAUAGAAGUAAUTAGAG |
| | GAGTGAGTAGAAGUUUAGGTATG |
| 56 | UATAUUTGGGUTTUTAUTUAUTUUTUTAGTTGUTTUTGTGAGTTTURGTTTU |
| | UTUTGAAAGAAUUAAUAAGATUTAUAUTAUAGTGTTGTTTGAAGGAUTAGAGAGTG |
| | UUTGTAGTGTGUUTUUAAUUUTGUTTUAUARGUATXGGGAUAUUTURGGUAGGGTG |
| | GUUTGmWGUAGGGAGGGUUATUTTGTTTTUUAAGTGGUAUUUAUTGUTGUUAGT |
| | GAGTAGTTTUAGTGGUUAGTGTGGAGAGGGUAUUTUTTUTGGUUTGTATGGTGGGU |
| | AGTGUUTGTTUTGUAUTGG |
| 57 | TURGGUATUAATTUTTAATGAGTUUURGAGUUUURGUAGTUUGTUTAUTTUTTTTU |
| | TTTTUUAGTGAATUUTUAUAGTUUUUTTTUUUTGUATGTTUTUTGTUUUAAATTTUT |
| | GAAGUUUUTUUUTTTURGTUTUTTAAGAATUTUTAXGAAUURGAAAGUURGTGAGG |
| | UTGATGGUARGTUTGTGGTTUUTTTUTUUTTUTTUUUTUUATAUUUAUAGUTUUURG |
| | GGAURGGAUUUTUUUUAUTUAUUAGGTGUAGGGUUAGGGGUAGUAGUAGGAGGA |
| | AUAGUUAUAGGTAGAGGTG |
| 58 | UAUUTUTAUUTGTGGUTGTTUUTUUTGUTGUTGUUUUTGGUUUTGUAUUTGGTGAG |
| | TGGGGAGGGTURGGTUURGGGGAGUTGTGGGTATGGAGGGAAGAAGGAGAAAGGA |
| | AUUAUAGARGTGUUATUAGUUTUARGGGUTTTRGGGTTXGTAGAGATTUTTAAGAG |
| | ARGGAAAGGGAGGGGUTTUAGAAATTTGGGAUAGAGAAUATGUAGGGAAAGGGGA |
| | UTGTGAGGATTUAUTGGAAAAGAAAAGAAGTAGAUAGGAUTGRGGGGGUTRGGGG |
| | AUTUATTAAGAATTGATGURGGA |
| 59 | AGUUTGTGUTUAGGAATAAUTAAGGAGTGGAGURGUATUAAUUTUUTTUUUAAATU |
| | RGGARGTUTTUUTURGAUTUAAGUUUAGUUTGAGGGUUATTUTUUTTGATTUAUUU |
| | TTGGAAAUAGAUAUUAGUUAAGGGAGUTGTUTUUTGGXGTTGARGAGGATURGATT |
| | TAGGTUAGTATTUTAGTTUUUAUTUUAUAGAGGAATUTGAUTGGAGGUUAGUTGTG |
| | GTRGATGAGTUATURGGAAUAUAAGUAGGUAGUTATTTURGAAUTAAATGGUATUT |
| | GATUTUUUTUUTUAUUTTGA |
| 60 | TUAAGGTGAGGAGGGAGATUAGATGUUATTTAGTTRGGAAATAGUTGUUTGUTTGT |
| | GTTURGGATGAUTUATRGAUUAUAGUTGGUUTUUAGTUAGATTUUTUTGTGGAGTG |
| | GGAAUTAGAATAUTGAUUTAAATRGGATUUTRGTUAAXGUUAGGAGAUAGUTUUUT |
| | TGGUTGGTGTUTGTTTUUAAGGGTGAATUAAGGAGAATGGUUUTUAGGUTGGGUTT |
| | GAGTRGGAGGAAGARGTURGGATTTGGGAAGGAGGTTGATGRGGUTUUAUTUUTTA |
| | GTTATTUUTGAGUAUAGGUT |
| 61 | GAUUTUAGGATUTGAATGGTTUTTGGAGTTUTTTGUAGATGAGGTAATGTTTTGGTT |
| | AAUTUATAGGTUAGAUUTGUTGTUUTTAGUTAAUTTGUURGGGAGGTTTTTAARGG |
| | AAGGUUTGTGTTAGUAUAAATUATATTTUUTGATGAXGAGUAGAGAUITITGATUTG |
| | GTUTTAAAGAARGRGTTTTUUAAUTTAUUUTGGGAUTTTTTTGAATTAGURGGUUAU |
| | ATATAUUAGGGTTUTUAGAGGATTTTTTUTUUUUTTTUTUTUTGTUTUTTTUTGGG |
| | TTTUUTATTAUTAATT |
| 62 | ATTAGTAATAGGAAAAAUUUAGAAAGAGAUAGAGAGAAAGGGGGGAAAAAATUUT |
| | UTGAGAAUUUTGGTATATGTGGURGGUTAATTUAAAAAAGTUUUAGGGTAAGTTGG |
| | AAAARGRGTTUTTTAAGAUUAGATUAAGGTUTUTGUTXGTUATUAGGAAATATGAT |
| | TTGTGUTAAUAUAGGUUTTURGTTAAAAAUUTUURGGGUAAGTTAGUTAAGGAUAG |
| | UAGGTUTGAUUTATGAGTTAAUUAAAAUATTAUUTUATUTGUAAAGAAUTUUAAGA |
| | AUUATTUAGATUUTGAGGTUU |
| 63 | GUUTGGAAUUURGGRGATUTUTTGTTTUTUUAUUAAGGGAAUTUTGUTTGTAAUAU |
| | TTTAAGUUTUAGUTGAAAAGTGGTUTUUTGGGTGAAGTUTUAUUTGTGUAUUUAUU |
| | TGAGGGTGAGTUAGUTUTGUTUUUUTGGUTUTUAURGXGGUTGTTATAGUATTTAU |
| | RGGAGTUUUAUAGTGAUTUATTTGTUUATUAUUUTUURGAUAAAUUTTUUAGUTTU |
| | TGAAGGGUAGAGAUAGUATUATAATUATUTTTTATAAUTUURGTGUUTAGTGUTAU |
| | TUUUAATUUUTAGTAAGUAT |
| 64 | ATGUTTAUTAGGGATTGGGAGTAGUAUTAGGUARGGGAGTTATAAAAGATGATTAT |
| | GATGUTGTUTUTGUUUTTUAGAAGUTGGAAGGTTTGTRGGGAGGGTGATGGAUAAA |
| | TGAGTUAUTGTGGGAUTURGGTAAATGUTATAAUAGUXGRGGTGAGAGUUAGGGGA |
| | GUAGAGUTGAUTUAUUUTUAGGTGGGTGUAUAGGTGAGAUTTUAUUUAGGAGAUU |
| | AUTTTTUAGUTGAGGUTTAAAGTGTTAUAAGUAGAGTTUUUTTGGTGGAGAAAUAA |
| | GAGATRGURGGGGTTUUAGGU |
| 65 | AATUUUTTUUURGGGATAGTUAARGAGGUTTTUAATTTAAAUTTGUATTTGAAGUTT |
| | GUAGAGAUTUAUAUTGAUTTAUUUAGGUUUTAAUAUAUAGUAGUTGTUTUUATGG |
| | TTGRGUUAGGTAGTGAAGGATAUAGGGUAGUAGGAAAXGAGTUURGGTTUTUAGGT |
| | GGATUURGTGUTTUUAUUTUTGTTAGAGUUUAGGUUUTGAGGGUATAGGGUUAAAT |
| | TGUUAUAGAGUTUUAGAGAAATUTGTUTUTUURGTUUUUUAUUUTAAGAUTGAGUT |
| | GUTGGAGGAAAGAGGUUAGG |
| 66 | UUTGGUUTUTTTUUTUUAGUAGUTUAGTUTTAGGGTGGGGGARGGGAGAGAUAGAT |
| | TTUTUTGGAGUTUTGTGGUAATTTGGUUUTATGUUUTUAGGGUUTGGGUTUTAAUA |
| | GAGGTGGAAGUARGGGATUUAUUTGAGAAURGGGAUTXGTTTUUTGUTGUUUTGTA |
| | TUUTTUAUTAUUTGGRGUAAUUATGGAGAUAGUTGUTGTGTGTTAGGGUUTGGGTA |
| | AGTUAGTGTGAGTUTUTGUAAGUTTUAAATGUAAGTTTAAATTGAAAGUUTRGTTGA |
| | UTATUURGGGGAAGGGATT |
| 67 | AGGAATGTTTAUTGAAGGAGTGAATGAAAUTATTGUATTAGATUAAGUUUAGGTGU |
| | AGAGGAUTGGTTTUAUATAGAAAGUATRGATTTTGUUUTAUAGAAUUUTGAUTUUA |
| | GTTTTUUAGUAGAUAAUUUTGGTGTGAAGAUAGAGGGGXGGGGAGGAAGGTAGGG |
| | GUTGAUATTTUUUAGUUUUTUUUAGGURGGTGGGGAGUTGAATAGUTUAGTGAUTT |
| | GTUUAGGAGUURGAGGTAAAUUAUAGAUTAAGAGUUAAGAGTUATGATTUAUTAU |
| | TTGUATTTUTUUAGUUATGAUA |
| 68 | TGTUATGGUTGGAGAAATGUAAGTAGTGAATUATGAUTUTTGGUTUTTAGTUTGTGG |
| | TTTAUUTRGGGUTUUTGGAUAAGTUAUTGAGUTATTUAGUTUUUUAURGGUUTGGG |
| | AGGGGUTGGGAAATGTUAGUUUUTAUUTTUUTUUUXGUUUUTUTGTUTTUAUAUUA |
| | GGGTTGTUTGUTGGAAAAUTGGAGTUAGGGTTUTGTAGGGUAAAATRGATGUTTTUT |
| | ATGTGAAAUUAGTUUTUTGUAUUTGGGUTTGATUTAATGUAATAGTTTUATTUAUTU |
| | UTTUAGTAAAUATTUUT |
| 69 | GUTGGGATTATATATGUAUAUUAUUATGUURGGUTAATTTTTATATTTTTGGTAGAG |
| | ATAGGGGTTUUAUUATGTTGGUUAGGGTGGTUTTGAAUUUUTGAUUTUAGGTGATU |
| | UAUUUAUUTTGGUUTUUUAGAGTGUTGGGATTAUAGGXGTGAGUUAUTGUAUURG |
| | GUAUAAAGUUATTTTAAAAUAGUTTTTTTTTTTTTTTTGAAAUAGUUTTGUUUTGTA |
| | GUUUAGGUTGGAGTGTAGTGGTAUAATUTUAGUTUAUTGUAAUUTUUAUUTTURGG |
| | GTTUAAGTGATTUTTGTGU |
| 70 | GUAUAAGAATUAUTTGAAUURGGAAGGTGGAGGTTGUAGTGAGUTGAGATTGTAUU |
| | AUTAUAUTUUAGUUTGGGUTAUAGGGUAAGGUTGTTTUAAAAAAAAAAAAAAAGU |
| | TGTTTTAAAATGGUTTTGTGURGGGTGUAGTGGUTUAXGUUTGTAATUUUAGUAUTU |
| | TGGGAGGUUAAGGTGGGTGGATUAUUTGAGGTUAGGGGTTUAAGAUUAUUUTGGU |
| | UAAUATGGTGGAAUUUUTATUTUTAUUAAAAATATAAAAATTAGURGGGUATGGTG |
| | GTGTGUATATATAATUUUAGU |
| 71 | AAUAAATGUUAUAGGUUUTAATTGUAGGUTUUAAGGAGTTGAGATTUUATAUTGGG |
| | GTTGUTGGAGGUAGAAGUUTTUUUAUTTTUAGGAUURGGAUUTGUUUTTUUUUUAR |
| | GRGGTUURGUUUAGUUAGUTAUAUUUTGGUUAUAGAGXGUTUAUAAAGGUTUAGT |
| | GTGTGTATGURGGGUTGAUTUAUAGTGGTTUTGGGUUUAGGRGAGGAUUTTUTUAG |
| | AGGGGRGGAAGGGGUUUTUTUUUTUUTGGUUATTTTUUATGGGGAGUAGTUAGTAA |
| | UUAGGAUUATGUUAGAUTTUA |
| 72 | TGAAGTUTGGUATGGTUUTGGTTAUTGAUTGUTUUUUATGGAAAATGGUUAGGAGG |
| | GAGAGGGUUUUTTURGUUUUTUTGAGAAGGTUUTRGUUTGGGUUUAGAAUUAUTG |
| | TGAGTUAGUURGGUATAUAUAUAUTGAGUUTTTGTGAGXGUTUTGTGGUUAGGGTG |
| | TAGUTGGUTGGGRGGGAURGRGTGGGGGAAGGGUAGGTURGGGTUUTGAAAGTGG |
| | GAAGGUTTUTGUUTUUAGUAAUUUUAGTATGGAATUTUAAUTUUTTGGAGUUTGUA |
| | ATTAGGGUUTGTGGUATTTGTT |
| 73 | GUAGTGUTAUAAUATUAATGUUAAGGURGTGGGGUAGUTGATGGTTTGGGUTUUUA |
| | AUTTUUUAGUUAGGTGUTTUTGUAGGUUUAUATUTTGUUUAUTGGUUAAAUUTTTA |
| | AATAAUTTTGAUTRGGGUTAUTUTTATGUTUAAAGAXGTUAGGGGUTUTUUUAAAT |
| | UTUTTTAUUUTGUUAGAAAGTUTTUTATAGTARGGUUTUUAUTTAGUTTTUARGUUT |
| | GATUTTUUATRGUATUUTGUTUATAAUUTGUUAUTAGTGAAUUUUTGUTGUTURGG |
| | UTUUAUAUTTUTUATGUTG |
| 74 | AGUATGAGAAGTGTGGAGURGGAGUAGUAGGGGTTUAUTAGTGGUAGGTTATGAG |
| | UAGGATGRGATGGAAGATUAGGRGTGAAAGUTAAGTGGAGGURGTAUTATAGAAG |
| | AUTTTUTGGUAGGGTAAAGAGATTTGGGAGAGUUUUTGAXGTUTTTGAGUATAAGA |
| | GTAGUURGAGTUAAAGTTATTTAAAGGTTTGGUUAGTGGGUAAGATGTGGGUUTGU |
| | AGAAGUAUUTGGUTGGGAAGTTGGGAGUUUAAAUUATUAGUTGUUUUARGGUUTT |
| | GGUATTGATGTTGTAGUAUTGUU |
| 75 | AGGAGGGARGTGGAAGTRGTGGGTGGUAGAGAAAAGTGTGUAURGUTGGGAGGTU |
| | TATTTUAAGAATAGGTTGGGATGAGAAAUATGTUTGGGRGAGGGGGGTGGGAGGUU |
| | RGGTGTUAUUTGTGGATGGATUUAUAGUUUTGUAATTGXGTGTTGUAAAGTTTGUU |
| | RGGUUURGUATTUATTTTGAAGGTTUTTGGRGATGUUTRGAUTTTTRGUUTUAAAGA |
| | AGTGAGUTUTUATAAGGTTUAGAGGURGGGAGUUAAAGRGGGAGTGAAGAUTUTR |
| | GAGGGGTUUAAATGAAGUAGA |
| 76 | TUTGUTTUATTTGGAUUUUTRGAGAGTUTTUAUTUURGUTTTGGUTUURGGUUTUTG |
| | AAUUTTATGAGAGUTUAUTTUTTTGAGGRGAAAAGTRGAGGUATRGUUAAGAAUUT |
| | TUAAAATGAATGRGGGGURGGGUAAAUTTTGUAAUAXGUAATTGUAGGGUTGTGGA |
| | TUUATUUAUAGGTGAUAURGGGUUTUUUAUUUUUUTRGUUUAGAUATGTTTUTUAT |
| | UUUAAUUTATTUTTGAAATAGAUUTUUUAGRGGTGUAUAUTTTTUTUTGUUAUUUA |
| | RGAUTTUUARGTUUUTUUT |
| 77 | UUTTTTTGAUUTGGRGAGTUUUTTUUUTTTUUATTTUATTTTATTGUTTTTTATTGTTT |
| | UUUTURGGUUTUTTUTUUUUTUUTAGGTUTTTTUTUTAGUTUAGTTTGGAGUTUAUA |
| | TUUTTTUUAUUUTTTTUAUUTUUTUUTTUUTUXGUUUUAGGATTATUUUTGGGAUU |
| | UATUUTGAGUTGAGUUTAUAGUUAGUUAGUUARGAAATAGAGGTGRGRGGGGGUA |
| | GGGTGGTATGGAGATTUTGXGGUUTTTGATTTGAUAUUTUURGGAGUTAURGUUAU |
| | AGGUUTGUUUATTTUAU |
| 78 | TGAAATGGGUAGGUUTGTGGRGGTAGUTURGGGAGGTGTUAAATUAAAGGUXGUA |
| | GAATUTUUATAUUAUUUTGUUUURGRGUAUUTUTATTTRGTGGUTGGUTGGUTGTA |
| | GGUTUAGUTUAGGATGGGTUUUAGGGATAATUUTGGGGXGGAGGAAGGAGGAGGT |
| | GAAAAGGGTGGAAAGGATGTGAGUTUUAAAUTGAGUTAGAGAAAAGAUUTAGGAG |
| | GGGAGAAGAGGURGGAGGGAAAUAATAAAAAGUAATAAAATGAAATGGAAAGGGA |
| | AGGGAUTRGUUAGGTUAAAAAGGU |
| 79 | GUTUAGTTTGGAGUTUAUATUUTTTUUAUUUTTTTUAUUTUUTUUTTUUTUXGUUUU |
| | AGGATTATUUUTGGGAUUUATUUTGAGUTGAGUUTAUAGUUAGUUAGUUARGAAA |
| | TAGAGGTGRGRGGGGGUAGGGTGGTATGGAGATTUTGXGGUUTTTGATTTGAUAUU |
| | TUURGGAGUTAUXGUUAUAGGUUTGUUUATTTUAUUTGURGGGAAGATAAUTTTGG |
| | UTTUTGGTGGTGGGTGGGTGATTGAUTUTUAAAATUUAAAGUATTGGTTTITTUTGG |
| | GTTAUTTUUTATGAUTGUT |
| 80 | AGUAGTUATAGGAAGTAAUUUAGAAAAAAUUAATGUTTTGGATTTTGAGAGTUAAT |
| | UAUUUAUUUAUUAUUAGAAGUUAAAGTTATUTTUURGGUAGGTGAAATGGGUAGU |
| | UUTGTGGXGGTAGUTURGGGAGGTGTUAAATUAAAGGUXGUAGAATUTUUATAUU |
| | AUUUTGUUUURGRGUAUUTUTATTTRGTGGUTGGUTGGUTGTAGGUTUAGUTUAGG |
| | ATGGGTUUUAGGGATAATUUTGGGGXGGAGGAAGGAGGAGGTGAAAAGGGTGGAA |
| | AGGATGTGAGUTUUAAAUTGAGU |
| 81 | UATTUUAAUTTUTGUAAUUATGUAUAGTGATRGATATTTATAATTAUUTTTTTUUTT |
| | UAUUATGGUAAURGGGTUUTURGARGAGUAGGAUTGAAGAAGGAARGAGGAATAA |
| | AUTUTGGGAGTGGAAGRGRGUUTRGGUAGAUAGATURGXGGGRGUTGGGGUAGUU |
| | AGGAGAAGUUURGGUATURGUTTGTGAGGTURGGGGUTGTGGTUTRGAGTUURGUU |
| | URGUUTRGGRGGGUUURGUTUUUATGUURGUUURGUTATRGUUUURGRGUTUTTUT |
| | URGUURGUURGURGAGUTGUA |
| 82 | TGUAGUTRGGRGGGRGGGRGGAGAAGAGRGRGGGGGRGATAGRGGGGRGGGUATG |
| | GGAGRGGGGUURGURGAGGRGGGGRGGGAUTRGAGAUUAUAGUUURGGAUUTUAU |
| | AAGRGGATGURGGGGUTTUTUUTGGUTGUUUUAGRGUUXGRGGATUTGTUTGURGA |
| | GGRGRGUTTUUAUTUUUAGAGTTTATTUUTRGTTUUTTUTTUAGTUUTGUTRGTRGG |
| | AGGAUURGGTTGUUATGGTGAAGGAAAAAGGTAATTATAAATATRGATUAUTGTGU |
| | ATGGTTGUAGAAGTTGGAATG |
| 83 | TATGATGUUAGTGGTTGAATAUUTTAGTAGAGAAAAATUTTGAATAATUAAUKUUA |
| | GGTTUAGGAGAUAGUTGGGTATTTGAGAGUUTATGAGTUAUATAAGUAAUUTTGGA |
| | GUUAAGTTGTATTUTUTGTTTGGUUTUAGAGUUAGTUTXGAGUAUATGUAGUUAGA |
| | UTGURGGUAGAGAAGATGTGGAGUTGGUATTUTGGUTTAGGUUTGAGUAAGGTRGT |
| | GGAAGUUUUAGGTTUUTGAUUATGGUURGUAUAGAGUUATGUTUUAGUUUTGGGT |
| | UTUAGUAGGUAGUUAGGTGAG |
| 84 | UTUAUUTGGUTGUUTGUTGAGAUUUAGGGUTGGAGUATGGUTUTGTGRGGGUUATG |
| | GTUAGGAAUUTGGGGUTTUUARGAUUTTGUTUAGGUUTAAGUUAGAATGUUAGUT |
| | UUAUATUTTUTUTGURGGUAGTLTTGGUTGUATGTGUTXGAGAUTGGUTUTGAGGUU |
| | AAAUAGAGAATAUAAUTTGGUTUUAAGGTTGUTTATGTGAUTUATAGGUTUTUAAA |
| | TAUUUAGUTGTUTUUTGAAUUTURGGTTGATTATTUAAGATTTTTUTUTAUTAAGGT |
| | ATTUAAUUAUTGGUATUATA |
| 85 | GGGGUTRGUAGTGGUUTAGTUTGUTUTGGGUTTTGUTGGATGUUUTTRGAGAATUA |
| | URGRGUAAUUTUUTTUAGAGGUUUAAUAUTUUARGTGUTGAUTTUURGGGUUTGTG |
| | TUTUUUUTGURGUAGAUTGAAGXGTTUURGGUTGAAGGTGAGGTTUTGUAUUAAXG |
| | AGTRGUAGAAGTUURGGGUAGAGUTGGTGGGGUAGUTTUAGAGGUTGGGATTTGAU |
| | ATUTUTGAGUAGGAGGTGAURGUUURGGUAUUAGUTGUUTGUUAGATUUTGAAGG |
| | AGUAAGGUUTGRGAUUATAUU |
| 86 | GGTATGGTRGUAGGUUTTGUTUUTTUAGGATUTGGUAGUUAGUTUUUUKUUUUKU |
| | GTUAUUTUUTGUTUAGAGATGTUAAATUUUAGUUTUTGAAGUTGUUUUAUUAGUTU |
| | TGUURGGGAUTTUTGRGAUTXGTTGGTGUAGAAUUTUAUUTTUAGURGGGAAXGUT |
| | TUAGTUTGRGGUAGGGGAGAUAUAGGUURGGGAAGTUAGUARGTGGAGTGTTGGG |
| | UUTUTGAAGGAGGTTGRGRGGTGATTUTRGAAGGGUATUUAGUAAAGUUUAGAGU |
| | AGAUTAGGUUAUTGRGAGUUUU |
| 87 | GRGGGGUUAGUAGRGTGUURGGRGGGAAGRGGTAUAGGRGUTURGGGAAGURGRG |
| | UAUUAGUTGUTTUAGUAUUATGURGUTUAGGTRGGURGTGUTUTUUTGRGARGGGT |
| | TGAAGATGRGGARGAAUTTUTUURGGUAGUTUAUAGUUAXGATUTTUAGGUUTGTR |
| | GGGUTGGGAAGAGAGGAGARGUTGTGAGGAGATGRGGURGGTUUAUURGUAUAGU |
| | TGRGRGUUURGUURGGAAAUUAGUTUUAGTURGGRGURGGAGGUTTGGGTUAUTRC |
| | UUUUTTAUUTUTGUAGGAGTTU |
| 88 | GAAUTUUTGUAGAGGTAAGGGGRGAGTGAUUUAAGUUTURGGRGURGGAUTGGAG |
| | UTGGTTTURGGGRGGGGRGRGUAGUTGTGRGGGTGGAURGGURGUATUTUUTUAUA |
| | GRGTUTUUTUTUTTUUUAGUURGAUAGGUUTGAAGATXGTGGUTGTGAGUTGURGG |
| | GAGAAGTTRGTURGUATUTTUAAUURGTRGUAGGAGAGUARGGURGAUUTGAGRGG |
| | UATGGTGUTGAAGUAGUTGGTGRGRGGUTTUURGGAGRGUUTGTAURGUTTUURGU |
| | RGGGUARGUTGUTGGUUURGU |
| 89 | AGGAGTGTTTGGGGTGUTTUUTUTTGGUTGUAGTGGGAUAUAGGTGTGUUTTUUTA |
| | GGAAUTGGGUUUTGAUTAUTTUUAGUUUAAUAUTUURGGGUUTGTGAAUTGTGAU |
| | UTGTGTGURGGGATGGGTTTTGTGGGTUTGUUUUATUUUXGUAUTGUTGGATUTGG |
| | UUAAGTGGGTGAAGGUTAAGGURGGTUAGAGTTGAGTTTUTGUUTTGTUUUUTUTU |
| | UTGGGUTAGATGUUAUAUUAGGUUUAGTGAUTUATAGGGUAGGUAGTTGGGAAAT |
| | AUUAGGUAGAGGGUAGGTUUTG |
| 90 | UAGGAUUTGUUUTUTGUUTGGTATTTUUUAAUTGUUTGUUUTATGAGTUAUTGGGU |
| | UTGGTGTGGUATUTAGUUUAGGAGAGGGGAUAAGGUAGAAAUTUAAUTUTGAURG |
| | GUUTTAGUUTTUAUUUAUTTGGUUAGATUUAGUAGTGXGGGGATGGGGUAGAUUU |
| | AUAAAAUUUATUURGGUAUAUAGGTUAUAGTTUAUAGGUURGGGAGTGTTGGGUT |
| | GGAAGTAGTUAGGGUUUAGTTUUTAGGAAGGUAUAUUTGTGTUUUAUTGUAGUUA |
| | AGAGGAAGUAUUUUAAAUAUTUUT |
| 91 | GUAGGAATUAGGUUAGRGTATGTAATGAAAAUTUTTGRGTTATUTTTTTAGAAGGAT |
| | GTGAUTGTATTTTATGAGTATGUAGUAGGGTUAUUAUAUAUUTTTTGUTUUTGGGU |
| | UUUTUUUUTGTGTGTAGUUUAGGUUURGGTTTGTGUTXGAGGGUUAGAXGGUUUTA |
| | TGGTUUUUAGTTTUUTURGTAGATUAUAUAGGGAGGUAGRGAGGUAGGGTGUAAG |
| | GATGTTAGGGGTGGAAGGGGTGAUAURGGGAGUAAAGAUTGUTAUUUUTTGGUUT |
| | GGATAAAUUTGTUTGAUATTU |
| 92 | GAATGTUAGAUAGGTTTATUUAGGUUAAGGGGTAGUAGTUTTTGUTUURGGTGTUA |
| | UUUUTTUUAUUUUTAAUATUUTTGUAUUUTGUUTRGUTGUUTUUUTGTGTGATUTA |
| | RGGAGGAAAUTGGGGAUUATAGGGURGTUTGGUUUTXGAGUAUAAAUXGGGGUUT |
| | GGGUTAUAUAUAGGGGAGGGGUUUAGGAGUAAAAGGTGTGTGGTGAUUUTGUTGU |
| | ATAUTUATAAAATAUAGTUAUATUUTTUTAAAAAGATAARGUAAGAGTTTTUATTA |
| | UATARGUTGGUUTGATTUUTGU |
| 93 | TGAUTGTATTTTATGAGTATGUAGUAGGGTUAUUAUAUAUUTTTTGUTUUTGGGUU |
| | UUTUUUUTGTGTGTAGUUUAGGUUURGGTTTGTGUTRGAGGGUUAGARGGUUUTAT |
| | GGTUUUUAGTTTUUTURGTAGATUAUAUAGGGAGGUAGXGAGGUAGGGTGUAAGG |
| | ATGTTAGGGGTGGAAGGGGTGAUAURGGGAGUAAAGAUTGUTAUUUUTTGGUUTG |
| | GATAAAUUTGTUTGAUATTUURGAUUTUTGAAGTUATUUATUATGGUTGRGUTGGU |
| | TUAGAUAUTTUAAGGGUUAUTTT |
| 94 | AAAGTGGUUUTTGAAGTGTUTGAGUUAGRGUAGUUATGATGGATGAUTTUAGAGGT |
| | RGGGAATGTUAGAUAGGTTTATUUAGGUUAAGGGGTAGUAGTUTTTGUTUURGGTG |
| | TUAUUUUTTUUAUUUUTAAUATUUTTGUAUUUTGUUTXGUTGUUTUUUTGTGTGAT |
| | UTARGGAGGAAAUTGGGGAUUATAGGGURGTUTGGUUUTRGAGUAUAAAURGGGG |
| | UUTGGGUTAUAUAUAGGGGAGGGGUUUAGGAGUAAAAGGTGTGTGGTGAUUUTGU |
| | TGUATAUTUATAAAATAUAGTUA |
| 95 | UAUAUAUUTTTUAGTTGAGGGGRGUTGAGGTUUUTGUTGTTGUTGTGURGTUTGAU |
| | UTGTUUUUTUTUTUTGAUAGAGAGUUAGUTGUTUUURGGGAAUAAUTTUAUUAATG |
| | AGTGUAAUATAUUAGGUAAUTTUATGTGUAGUAATGGAXGGTGUATUURGGGRGU |
| | UTGGUAGTGTGARGGGUTGUUTGAUTGUTTRGAUAAGAGTGATGAGAAGGAGTGUR |
| | GTGAGTGGUUTGGUUUTTTGUTGGGGTGGGGTGGUAGUUATUUTGGGGUAGAGGGG |
| | AGUAGGTUUTGAGUAGGUTTA |
| 96 | TAAGUUTGUTUAGGAUUTGUTUUUUTUTGUUUUAGGATGGUTGUUAUUUUAUUUU |
| | AGUAAAGGGUUAGGUUAUTUARGGUAUTUUTTUTUATUAUTUTTGTRGAAGUAGTU |
| | AGGUAGUURGTUAUAUTGUUAGGRGUURGGGATGUAUXGTUUATTGUTGUAUATG |
| | AAGTTUUTGGTATGTTGUAUTUATTGGTGAAGTTGTTUURGGGGAGUAGUTGGUTU |
| | TUTGTUAGAGAGAGGGGAUAGGTUAGARGGUAUAGUAAUAGUAGGGAUUTUAGRG |
| | UUUUTUAAUTGAAAGGTGTGTG |
| 97 | UATGUATTTTGTGTTTGTAGTGTGUTGGUUARGGGAGUAUTUTAAAUAUATTATGGG |
| | URGGGRGUAGTGGUTURGGUUTGTAATUTUAGUAUTTTGGGAGGUTGAGGRGGGUA |
| | GATUAUTTGAGUUUAGGAGTTXGAUAUUAGUUTGGUUAAUAXGGXGAAAUUUXGT |
| | UTUTAUTAAAAATAUAAAAATTAAURGGGTGTGATGGRGRGTGUUTGTATTUUUAG |
| | UTAUTAGGGAGGUTGAGGUAGGAGAATUTUUTGAAUUTGGGAGGUAGGGAUTGUA |
| | GTGAGUUAAGATTGTGUUAUT |
| 98 | AGTGGUAUAATUTTGGTUAUTGUAGTUUUTGUUTUUUAGGTUAGGAGATTUTUU |
| | TGUUTUAGUUTUUUTAGTAGUTGGGAATAUAGGUARGRGUUATUAUAUURGGTTAA |
| | TTTTTGTATTTTTAGTAGAGAXGGGTTTXGUXGTGTTGGUUAGGUTGGTGTXGAAU |
| | TUUTGGGUTUAAGTGATUTGUURGUUTUAGUUTUUUAAAGTGUTGAGATTAUAGGU |
| | RGGAGUUAUTGRGUURGGUUUATAATGTGTTTAGAGTGUTUURGTGGUUAGUAUAU |
| | TAUAAAUAUAAAATGUATG |
| 99 | GGAUTGTGGGUUUUTTGGTTTGTGTUTGAAAGUTGGGGGTAUAGTTUTGUATGGGTT |
| | GGUUUUTGUUTTAUUTRGGGAAGUTUUUAGAGUUTGUTGGGUAGUUTGUUTUUTU |
| | UTUTUAUUTUUTUXGTUTUUAUTUUUTUUTUAUUAUATTURGGUTUTUUUARGGUR |
| | GGAGGUXGTGAATGGGUTGUTTTGTTGUURGGUUUAUAUAGGAGGATGGTGGUAG |
| | AAGAUUURGGUAUAAAGTUAGUAUUUAUTUTGTTUUUAGGUTGGGTTUAGGGAGG |
| | UTGAAAAGUUAUTTUAGUTGTG |
| 100 | UAUAGUTGAAGTGGUTTTTUAGUUTUUUTGAAUUUAGUUTGGGAAUAGAGTGGGTG |
| | UTGAUTTTGTGURGGGGTUTTUTGUUAUUATUUTUUTGTGTGGGURGGGUAAUAAA |
| | GUAGUUUATTUARGGUUTURGGURGTGGGAGAGURGGAATGTGGTGAGGAGGGAG |
| | TGGAGARGGAGGAGGTGAGAGGAGGAGGUAGGUTGUUUAGUAGGUTUTGGGAGUT |
| | TUURGAGGTAAGGUAGGGGUUAAUUUATGUAGAAUTGTAUUUUUAGUTTTUAGAU |
| | AUAAAUUAAGGGGUUUAUAGTUU |
| 101 | TAUTUTUTTGATGTATGAUUTTGGATGTGATTTAGUUTUTUTGGGUUTTGGUUUKUU |
| | TGAAUUATGTGATUAGAGUAUUAAGURGGUUTUUUARGUTGGTUTGAGUTGUTUAA |
| | GGGUUATUTAGGTUUTUTTTGTUUUAAGUUAGAGGTXGUUTUTUUURGGUUAAGUR |
| | GRGGUTATGGGGGTGGTGGTAUAAUAGAGAGUAUAGGGAUTTTGGAAUAUAAUAU |
| | TGGGTUATGAUUUUTGUUTGGUUAUTUTTGGUTGUTGAUUTTGAUUUTUTGTUTUU |
| | TUUTTTGTGAATGGGGGGAGT |
| 102 | AUTUUUUUUATTUAUAAAGGAGGAGAUAGAGGGTUAAGGTUAGUAGUUAAGAGTG |
| | GUUAGGUAGGGGTUATGAUUUAGTGTTGTGTTUUAAAGTUUUTGTGUTUTUTGTTG |
| | TAUUAUUAUUUUUATAGURGRGGUTTGGURGGGGAGAGGXGAUUTUTGGUTTGGG |
| | AUAAAGAGGAUUTAGATGGUUUTTGAGUAGUTUAGAUUAGRGTGGGAGGURGGUT |
| | TGGTGUTUTGATUAUATGGTTUAGRGGGGUUAAGGUUUAGAGAGGUTAAATUAUAT |
| | UUAAGGTUATAUATUAAGAGAGTA |
| 103 | GUUATGGAGAAAATATGUUATGTUTUUATGGAAAUUAAUUTATTTGUTTAAUTGAGGTTUTG |
| | GGGGTGGTTUTGAUAUTUAGTGUTAAUUAGGGGGAGTUTGGUTGTGAGGTRGTUAGUAUATG |
| | GRGGTGUTGURGGUTGUUTUUUAXGUAXGUAGGUTUTGUUAGUUTGUUTTGUUAATUTGUU |
| | AGGUAAUTGGGAUAGGTGUAGAUATGAUUUAGGUTUUAAGUAUARGUATUUAUUUTUUUR |
| | GURGAGGUAUTUTUURGGTGUUATATGTTGAUTUTGUUUAGRGUUAGGUAGUUUA |
| 104 | TGGGUTGUUTGGRGUTGGGUAGAGTUAAUATATGGUAURGGGAGAGTGUUTRGGRGGGGAG |
| | GGTGGATGRGTGTGUTTGGAGUUTGGGTUATGTUTGUAUUTGTUUUAGTTGUUTGGUAGATT |
| | GGUAAGGUAGGUTGGUAGAGUUTGXGTGXGTGGGAGGUAGURGGUAGUAURGUUATGTGUT |
| | GARGAUUTUAUAGUUAGAUTUUUUUTGGTTAGUAUTGAGTGTUAGAAUUAUUUUUAGAAUU |
| | TUAGTTAAGUAAATAGGTTGGTTTUUATGGAGAUATGGUATATTTTUTUUATGGU |
| 105 | GAGTUTGGUTGTGAGGTRGTUAGUAUATGGRGGTGUTGURGGUTGUUTUUUARGUA |
| | RGUAGGUTUTGUUAGUUTGUUTTGUUAATUTGUUAGGUAAUTGGGAUAGGTGUAG |
| | AUATGAUUUAGGUTUUAAGUAUARGUATUUAUUUTUUUXGURGAGGUAUTUTUUR |
| | GGTGUUATATGTTGAUTUTGUUUAGRGUUAGGUAGUUUAGRGUUUAUUTUUUUUT |
| | UUUUAGUUTGGUUUUARGUAUAGTGUTUTAGUUTUTGUTGGGTAGTGTGAGGAGTG |
| | GUAATUTGUAGGUAUUUTAGAAG |
| 106 | UTTUTAGGGTGUUTGUAGATTGUUAUTUUTUAUAUTAUUUAGUAGAGGUTAGAGUA |
| | UTGTGRGTGGGGUUAGGUTGGGGAGGGGGAGGTGGGRGUTGGGUTGUUTGGRGUT |
| | GGGUAGAGTUAAUATATGGUAURGGGAGAGTGUUTRGGXGGGGAGGGTGGATGRG |
| | TGTGUTTGGAGUUTGGGTUATGTUTGUAUUTGTUUUAGTTGUUTGGUAGATTGGUA |
| | AGGUAGGUTGGUAGAGUUTGRGTGRGTGGGAGGUAGURGGUAGUAURGUUATGTG |
| | UTGARGAUUTUAUAGUUAGAUTU |
| 107 | GURGAATUURGAGGGURGAGUAUUUUTUUUTUAGURGUAUTGUAUUTGUURGTAG |
| | GTGAUUAAUUUARGGGRGGAUUUUUAGAUUUAATUUTUTUUAGAGUUAGGGTGGG |
| | ATGGGUAGGGAUAGGAGURGGAGGUUUTAUTGGUUURGGGXGAAGGUATUUTGGA |
| | AAGUATUUAGAGRGTUUAGUATUUUTUURGRGGUUAUURGUAGGUTGAURGAUUU |
| | UTGGGUAGAUUUTUAGAUTUAATUUAGTUUAGGGRGGATTAAGGAGTGGGAGAUA |
| | AGGGAGURGGTGGUUURGUTGGUUU |
| 108 | GGGUUAGRGGGGUUAURGGUTUUUTTGTUTUUUAUTUUTTAATURGUUUTGGAUTG |
| | GATTGAGTUTGAGGGTUTGUUUAGGGGTRGGTUAGUUTGRGGGTGGURGRGGGAGG |
| | GATGUTGGARGUTUTGGATGUTTTUUAGGATGUUTTXGUURGGGGUUAGTAGGGUU |
| | TURGGUTUUTGTUUUTGUUUATUUUAUUUTGGUTUTGGAGAGGATTGGGTUTGGGG |
| | GTURGUURGTGGGTTGGTUAUUTARGGGUAGGTGUAGTGRGGUTGAGGGAGGGGTG |
| | UTRGGUUUTRGGGATTRGGU |
| 109 | TTGUTTGAUUAAAAGAATGUAGUAGAUATAAUTTTGAGAUUTGGAGUTAGGTUAUA |
| | AGARGATTTUUTGGGTTTTGTGGAATTUTRGTTUTGAAAGAAAUAAGUUAUUAAGT |
| | GGURGGGTGAGUTGGUTUAXGUUTGTAATUUUAGUAUTTTGGGAGGUXGAGURGG |
| | GUXGATUAUAAGGTUAGGAGATRGAGAUUATUUTGGUTAAUATGGTGAAAUUURG |
| | TUTUTAUTAAAAATAUAAAAAAATTAGURGGGUATAUTGGRGGGRGUUTGTAGTUU |
| | UAGUTAUTRGGGAGGUTGAGGU |
| 110 | GUUTUAGUUTUURGAGTAGUTGGGAUTAUAGGRGUURGUUAGTATGUURGGUTAAT |
| | TTTTTTGTATTTTTAGTAGAGARGGGGTTTUAUUATGTTAGUUAGGATGGTUTRGATU |
| | TUUTGAUUTTGTGATXGGUURGGUTXGGUUTUUUAAAGTGUTGGGATTAUAGGXGT |
| | GAGUUAGUTUAUURGGUUAUTTGGTGGUTTGTTTUTTTUAGAARGAGAATTUUAUA |
| | AAAUUUAGGAAATRGTUTTGTGAUUTAGUTUUAGGTUTUAAAGTTATGTUTGUTGU |
| | ATTUTTTTGGTUAAGUAA |
| 111 | AGAATUTGUUTAGUAGGRGGUTUTUUUUTGUTUUUUUAURGAGUAUAUAUKUIUU |
| | GAGGGGAUUUTGRGGGAGGAGGUTGUTTUAGTUTUUAGAGAUUATUTUUUATUTUT |
| | AUAGRGAUTUUUUTATGAURGTUUUUUAUURGGTGUTUTXGGGUUARGGGGAAGG |
| | GAUAUTRGGGAAAGAUAUUAGAGAURGGGAGGGTGUAGUTGGGUTUTTRGRGGGG |
| | AGRGGGRGGGAGGUUTTUUTGTTAUATGTRGUAGUTGGGAUAUAGARGGUAGRGUT |
| | UUAGGGTUUAUTTGURGGUTTRG |
| 112 | RGAAGURGGUAAGTGGAUUUTGGAGRGUTGURGTUTGTGTUUUAGUTGRGAUATGT |
| | AAUAGGAAGGUUTUURGUURGUTUUURGRGAAGAGUUUAGUTGUAUUUTUURGGT |
| | UTUTGGTGTUTTTUURGAGTGTUUUTTUUURGTGGUUXGAGAGUAURGGGTGGGGG |
| | ARGGTUATAGGGGAGTRGUTGTAGAGATGGGAGATGGTUTUTGGAGAUTGAAGUAG |
| | UUTUUTUURGUAGGGTUUUUTUUUARGGTUTGTGUTRGGTGGGGGAGUAGGGGAG |
| | AGURGUUTGUTAGGUAGATTUT |
| 113 | AGGUUUAGGUAGAGGTUAGAGUUUAAGUUUTGTUUURGAAGGAAATGTGTUUUAT |
| | GUTAAUTAUTUUATAGUTGAGGUUTGGAGGGAAGTUAGGGAUUUTGGGAUTGGTTA |
| | TUUTGGUUTTGAUTUATTAUTGTTURGGAGAUUTAAAXGUAUUUTGAGUUAUUAGA |
| | XGTGGGTGTTAAUAUUTGAGGTUAAUUUUUTGAXGUTTURGGUTGUTUTGGAGGAA |
| | GUTGGTUUTUUUTUUUAUUTUUTGTTTTURGTGUUAGUUTGGTAUAGAGTUAAGGG |
| | GUTTGGUTGGGUTTGGUTGGG |
| 114 | UUAGUUAAGUUUAGUUAAGUUUUTTGAUTUTGTAUUAGGUTGGUARGGAAAAUAG |
| | GAGGTGGGAGGGAGGAUUAGUTTUUTUUAGAGUAGURGGAAGXGTUAGGGGGTTG |
| | AUUTUAGGTGTTAAUAUUUAXGTUTGGTGGUTUAGGGTGXGTTTAGGTUTURGGAA |
| | UAGTAATGAGTUAAGGUUAGGATAAUUAGTUUUAGGGTUUUTGAUTTUUUTUUAG |
| | GUUTUAGUTATGGAGTAGTTAGUATGGGAUAUATTTUUTTRGGGGAUAGGGUTTGG |
| | GUTUTGAUUTUTGUUTGGGUUTG |
| 115 | UUUATGUTAAUTAUTUUATAGUTGAGGUUTGGAGGGAAGTUAGGGAUUUTGGGAU |
| | TGGTTATUUTGGUUTTGAUTUATTAUTGTTURGGAGAUUTAAAXGUAUUUTGAGUU |
| | AUUAGAXGTGGGTGTTAAUAUUTGAGGTUAAUUUUUTGAXGUTTURGGUTGUTUTG |
| | GAGGAAGUTGGTUUTUUUTUUUAUUTUUTGTTTTURGTGUUAGUUTGGTAUAGAGT |
| | UAAGGGGUTTGGUTGGGUTTGGUTGGGUTUAGAAARGTGGUAGTUAGGAGUUAGU |
| | UTGRGGGUAGRGGGGTGUTGGG |
| 116 | UUUAGUAUUURGUTGUURGUAGGUTGGUTUUTUAUTGUUARGTTTUTGAGUUUAG |
| | UUAAGUUUAGUUAAGUUUUTTGAUTUTGTAUUAGGUTGGUARGGAAAAUAGGAGG |
| | TGGGAGGGAGGAUUAGUTTUUTUUAGAGUAGURGGAAGXGTUAGGGGGTTGAUUT |
| | UAGGTGTTAAUAUUUAXGTUTGGTGGUTUAGGGTGXGTTTAGGTUTURGGAAUAGT |
| | AATGAGTUAAGGUUAGGATAAUUAGTUUUAGGGTUUUTGAUTTUUUTUUAGGUUT |
| | UAGUTATGGAGTAGTTAGUATGGG |
| 117 | UTUTUUURGUAGTTTUATURGTUUTUUTUUURGUUTUTGRGAGUTGGGTTTGGGGAR |
| | GTUTGGGTGGAATGTAGAUUUAUAGGUTGTUUTTGGTGUUUTUUUTUUUTGTTUTU |
| | UAGRGUUUUAGUUUUAGAUAUUAGTUUUUUAGRGGGXGAAAGUURGGGAGRGUU |
| | TTUUURGAAAGAUATUAGGGTGUUARGRGGUUUUTGUUUTGUAGAAGUATUUUUU |
| | TUURGUUUUTGUUTGGAAAGUAGGUUUUTUUUTAAGUTUTGRGUUUTTUTTUUUTG |
| | GGRGUUUTRGGAURGTGGUURG |
| 118 | RGGGUUARGGTURGAGGGRGUUUAGGGAAGAAGGGRGUAGAGUTTAGGGAGGGGU |
| | UTGUTTTUUAGGUAGGGGRGGGAGGGGGATGUTTUTGUAGGGUAGGGGURGRGTG |
| | GUAUUUTGATGTUTTTRGGGGAAGGRGUTUURGGGUTTTXGUURGUTGGGGGAUTG |
| | GTGTUTGGGGUTGGGGRGUTGGAGAAUAGGGAGGAAGGGUAUUAAGGAUAGUUTG |
| | TGGGTUTAUATTUUAUUUAGARGTUUUUAAAUUUAGUTRGUAGAGGRGGGGAGGA |
| | GGARGGATGAAAUTGRGGGGAGAG |
| 119 | AGAGGAGTGGGGAGRGUAGUAGGGTGGUUUURGUTUURGUTUAGAGGAGUTGGUU |
| | UTTTAAGGUUAGGUUUAGGRGGGTRGGGAAUAGAGAUURGGGAATGTGGGUTGGA |
| | UTGGGGAGUAGAGUUAUUUAGUATGAGTUATTUURGTTTXGURGGAUTUTTRGURG |
| | UTGGUTUTRGUTTGURGUUUTUUUUTGGUUUTGGUUUTGGUUTUTGRGUUUTUUUT |
| | GUAGAGUTGGTURGGGTGGGUTGGRGGUUTUUAUURGUUAUAAGRGUAUAGGGUT |
| | UTGUUUAUTUUURGUUUUTTTTU |
| 120 | GAAAAGGGGRGGGGAGTGGGUAGAGUUUTGTGRGUTTGTGGRGGGTGGAGGURGU |
| | UAGUUUAUURGGAUUAGUTUTGUAGGGAGGGRGUAGAGGUUAGGGUUAGGGUUA |
| | GGGGAGGGRGGUAAGRGAGAGUUAGRGGRGAAGAGTURGGXGAAARGGGAATGAU |
| | TUATGUTGGGTGGUTUTGUTUUUUAGTUUAGUUUAUATTUURGGGTUTUTGTTUUR |
| | GAUURGUUTGGGUUTGGUUTTAAAGGGUUAGUTUUTUTGAGRGGGAGRGGGGGUU |
| | AUUUTGUTGRGUTUUUUAUTUUTUT |
| 121 | GURGAGRGRGGTGGUTUATGUUTGTAATUUUAGUAUTTTGGGAGARGGAGGTGGGT |
| | GGATUAUUTUAGGTUAGAAGTTTGAGAUUTUTGTUTUTAUTGAAAUTATAAAAAAT |
| | TGGURGGGUATGGTGGTGGGTGTUTGTAGTTUUAGUTAXGTGGTAAGUTGAGGUAG |
| | GAGAATGAUTTGAAUURGGGAGGRGGAGGTTGUAGTGAGUUAGGATTGRGUUAUT |
| | GUAUTUUAGUUTGGGAGAUAGAGTUAGAUTUTGTUTUAAAAAAAAGUTATGGGUU |
| | TGUAGGATGUUTAATATAAAAG |
| 122 | UTTTTATATTAGGUATUUTGUAGGUUUATAGUTTTTTTTTGAGAUAGAGTUTGAUTU |
| | TGTUTUUUAGGUTGGAGTGUAGTGGRGUAATUUTGGUTUAUTGUAAUUTURGUUTU |
| | URGGGTTUAAGTUATTUTUUTGUUTUAGUTTAUUAXGTAGUTGGAAUTAUAGAUAU |
| | UUAUUAUUATGUURGGUUAATTTTTTATAGTTTUAGTAGAGAUAGAGGTUTUAAAU |
| | TTUTGAUUTGAGGTGATUUAUUUAUUTURGTUTUUUAAAGTGUTGGGATTAUAGGU |
| | ATGAGUUAURGRGUTRGGU |
| 123 | UARGUTUUTGTTTUAUTTTUATGTTUTGUTUTGTAUAUUTGGUTURGUUTTUTAGAT |
| | AGUAATAGUAGAATTAGTGAAAGTATTAAAGTUTTTGATUTTTUTGAGAAGAGUAT |
| | AGAAGAAATAATGARGTAAGUTGTUUTUTUTUUAGUTXGGUTAUUTAAAAGGGAAA |
| | GGUUUUUTGTURGGTGGAUARGTGAUTUAUATGAUUTTATTAATUAUTGGAGATGA |
| | UTUAUAUTUUTTAUUUTGUUUUTTTGUUTTGTAUAUAATAAATAAUAGRGRGAUUA |
| | GGUATTRGGGGUUAUTGUU |
| 124 | GGUAGTGGUUURGAATGUUTGGTRGRGUTGTTATTTATTGTGTAUAAGGUAAAGGG |
| | GUAGGGTAAGGAGTGTGAGTUATUTUUAGTGATTAATAAGGTUATGTGAGTUARGT |
| | GTUUAURGGAUAGGGGGUUTTTUUUTTTTAGGTAGUXGAGUTGGAGAGAGGAUAG |
| | UTTARGTUATTATTTUTTUTATGUTUTTUTUAGAAAGATUAAAGAUTTTAATAUTTTU |
| | AUTAATTUTGUTATTGUTATUTAGAAGGRGGAGUUAGGTGTAUAGAGUAGAAUATG |
| | AAAGTGAAAUAGGAGRGTG |
| 125 | AGUUUUUTGGGRGGGGTURGGGGAGUAGGUURGUATTTGGAGGAUAGGGTGTGAU |
| | UUATUTGAATUUTRGTTAAAGTAAAAGURGAURGARGGUTUTGGGAGGTTTGAGGU |
| | UTGGRGGGGRGGUUURGGGAAGTGATTTGTGGUXGUTAGGXGRGXGUTGGAAAUU |
| | UTTTUUUATUTGRGGAGUUUAURGGAGUTGTGATRGGAGGAGGAATTUUUUUAGGU |
| | AGGGAGGAURGUAGGGUUTTTTTUAUTRGTUUTGAGGGGUUUTGGGGUTTGGGGAG |
| | UAAAUUTGGGGTGAUUUATTTU |
| 126 | GAAATGGGTUAUUUUAGGTTTGUTUUUUAAGUUUUAGGGUUUUTUAGGARGAGTG |
| | AAAAAGGUUUTGRGGTUUTUUUTGUUGGGGGAATTUUTUUTURGATUAUAGUTUR |
| | GGTGGGUTURGUAGATGGGAAAGGGTTTUUAGXGRGXGUUTAGXGGUUAUAAATU |
| | AUTTUURGGGGURGUUURGUUAGGUUTUAAAUUTUUUAGAGURGTRGGTRGGUTTT |
| | TAUTTTAARGAGGATTUAGATGGGTUAUAUUUTGTUUTUUAAATGRGGGUUTGUTU |
| | UURGGAUUURGUUUAGGGGGUT |
| 127 | UATUUAUAAAUUTUUUAGGUUUUUTUAUTUTTUURGUAUAGTUTGUUTURGGTGUT |
| | UUAGAAAGAUTGGAAATGAGGTGAGUTUUUTTGGATUUUTGUUTGUUAUUTGUAA |
| | ATATUATGTGGTGUTAUTTGUUUTUUTGTUUUTUUTUUXGTUUUAGGUUAATUUTU |
| | UUAUUUUUTTAATTGUURGGGGATUTUUATTAUTTAAAUUTTTUUAUTGGTAUUTUT |
| | UUTUUUAUAUAAGUUTUUTUAGUTGTTTTURGTUTTTAAUUAAUAUUTTUUUTGGU |
| | TUUAGUTAUTGUUAUTTUAT |
| 128 | ATGAAGTGGUAGTAGUTGGAGUUAGGGAAGGTGTTGGTTAAAGARGGAAAAUAGU |
| | TGAGGAGGUTTGTGTGGGAGGAGAGGTAUUAGTGGAAAGGTTTAAGTAATGGAGAT |
| | UUURGGGUAATTAAGGGGGTGGGAGGATTGGUUTGGGAXGGGAGGAGGGAUAGGA |
| | GGGUAAGTAGUAUUAUATGATATTTGUAGGTGGUAGGUAGGGATUUAAGGGAGUT |
| | UAUUTUATTTUUAGTUTTTUTGGAGUAURGGAGGUAGAUTGTGRGGGAAGAGTGAG |
| | GGGGUUTGGGAGGTTTGTGGATG |
| 129 | UTTTUUUAGGAUTGUUTTGGUUUUUTGGUUUUAGTUTGGAGGAUTUTTGUTUAUTT |
| | UUTURGUUUUUAGGTGAGUTGAGAAUUUAUTGRGRGRGGGAUTUTGUTGRGUUTG |
| | UUUTUURGGGUTGUAGAGGGUAGGAXGUAURGUUAGGUAAGGURGRGGUTUTGXG |
| | UTGATGUUAUTURGGGAGRGGGTGGUTGRGGGGGAGGAGGGRGAGUAUTGGARGG |
| | GGGUAGRGGAGTGTAGGGTGTGAGATUTAAAUAGAGGGUTUUAUTGGAGGGUTTG |
| | UUUAGAAGGRGGUAGTUAUAUTGG |
| 130 | UUAGTGTGAUTGURGUUTTUTGGGUAAGUUUTUUAGTGGAGUUUTUTGTTTAGATU |
| | TUAUAUUUTAUAUTURGUTGUUUURGTUUAGTGUTRGUUUTUUTUUUURGUAGUUA |
| | UURGUTUURGGAGTGGUATUAGXGUAGAGURGRGGUUTTGUUTGGRGGTGXGTUUT |
| | GUUUTUTGUAGUURGGGAGGGUAGGRGUAGUAGAGTUURGRGRGUAGTGGGTTUT |
| | UAGUTUAUUTGGGGGRGGAGGAAGTGAGUAAGAGTUUTUUAGAUTGGGGUUAGGG |
| | GGUUAAGGUAGTUUTGGGAAAG |
| 131 | TTTAGGGTUTUTUTUURGUUTUTTTTUUTUUUURGUTUUUTUTUTUUTTGRGGUTGA |
| | UTUUAGUTUUUUUTRGGTGUURGTAAUUUTUUTTTUUTUTTTTGUXGUAGTUTUXG |
| | TUTUTUTTUUAUAGGGTUTUTUUUTUUUUUTUTUUURGTGGTTGTUAGAUTTTUTUU |
| | TGGAUTTTUTURGUUURGUAURGUUXGUUURGGATGURGAGRGTGGTAGAUTUTGU |
| | AGURGGGUTUUTRGUTGUURGUTGGRGUTGUUTAUAUUUUUTTGGGUTUUUUTUUA |
| | AGGTUUUUTURGUTRGU |
| 132 | GRGAGRGGAGGGGAUUTTGGAGGGGAGUUUAAGGGGGTGTAGGUAGRGUUAGRGG |
| | GUAGRGAGGAGUURGGUTGUAGAGTUTAUUARGUTRGGUATURGGGGXGGGRGGT |
| | GRGGGGRGGAGAAAGTUUAGGAGAAAGTUTGAUAAUUARGGGGAGAGGGGGAGGG |
| | AGAGAUUUTGTGGAAGAGAGAXGGAGAUTGXGGUAAAAAGAGGAAAGGAGGGTTA |
| | RGGGUAURGAGGGGGAGUTGGAGTUAGURGUAAGGAGAGAGGGAGRGGGGGAGG |
| | AAAAGAGGRGGGAGAGAGAUUUTAAA |
| 133 | GAGGGUUAUAGTAAAUTGGAUAAGTTTTTUTGUUUAGUUTAGGUTGUUAUUTGTAG |
| | GTUAUTTGGGUTUUAGUTATGTGGUTGUUTUTTUTGUTGGGTGUUTTAUTUTGGGUA |
| | GTGUTGTGGTTGUTUAGGGAURGGUAGAGUUTGUUXGUUAGUAATGUUTTTGTUTT |
| | UATUAURGGUTGTGAUTUAGGUTTTGGGRGUUTTUTGGUAUTGUAGUTGGAUUAGA |
| | GAGGUTTURGAGTUUTGGUUAGUTGUUTGAUUUUUTURGGGGURGAGGAUUTGUA |
| | GRGGGTGGUUTUUTUURGUU |
| 134 | GRGGGAGGAGGUUAUURGUTGUAGGTUUTRGGUUURGGAGGGGGTUAGGUAGUTG |
| | GUUAGGAUTRGGAAGUUTUTUTGGTUUAGUTGUAGTGUUAGAAGGRGUUUAAAGU |
| | UTGAGTUAUAGURGGTGATGAAGAUAAAGGUATTGUTGGXGGGUAGGUTUTGURG |
| | GTUUUTGAGUAAUUAUAGUAUTGUUUAGAGTAAGGUAUUUAGUAGAAGAGGUAG |
| | UUAUATAGUTGGAGUUUAAGTGAUUTAUAGGTGGUAGUUTAGGUTGGGUAGAAAA |
| | AUTTGTUUAGTTTAUTGTGGUUUTUA |
| 135 | GTTUTGGUTTUATTTTTTTTTTUUUAAAATGUUATTTTUATTTGTTUTTAGAGTTUAG |
| | AAUATGTUAAAGAGUTTUTTTAAGUAGTAGGTGGTTTTAUAGAGUUUAUAGAGAAG |
| | GAAAAUTAAATATUATUURGGATGUAGTUUAUTAXGATXGTGGAGGAGTUAGATTA |
| | UTUTURGGGUTTTGUTGTGTUTGUTTGTGAAAUAGGAAAGGGAGAAUTGAGGUAAT |
| | GAGTUAUUTUAUTTGGGUUUAAAGUAUUAUUTARGTTGAATATGGAGAAAATGTGA |
| | AGUAAGAGTTTUTTTTTA |
| 136 | TAAAAAGAAAUTUTTGUTTUAUATTTTUTUUATATTUAARGTAGGTGGTGUTTTGGG |
| | UUUAAGTGAGGTGAUTUATTGUUTUAGTTUTUUUTTTUUTGTTTUAUAAGUAGAUA |
| | UAGUAAAGUURGGAGAGTAATUTGAUTUUTUUAXGATXGTAGTGGAUTGUATURGG |
| | GATGATATTTAGTTTTUUTTUTUTGTGGGUTUTGTAAAAUUAUUTAUTGUTTAAAGA |
| | AGUTUTTTGAUATGTTUTGAAUTUTAAGAAUAAATGAAAATGGUATTTTGGGAAAA |
| | AAAAAATGAAGUUAGAAU |
| 137 | UUTUUTUUAGTUTTTGUATATATAUUAGGUTGGTATUUATTGUAGGTGGGGAUUTU |
| | UTUTTTGGGUTTTGGAGUUUUUUTUUUTGTGTUTUTGTAURGGGGAGUTTUTTUUTT |
| | UTGTUTTUTUUUTTUUTTUTTGUTUATTAAAUTUTUXGUTUUTTAAAAUUAUTUUAR |
| | GTGTGTURGTGTTGTTTTATUTAAAURGGRGGUAGGATUAAGAAUUUTTGTGT |
| | GUAUTUATUAGAGURGTATGATAATUAAGAGUTGAUTAUUTGGGUUATTUTUATAU |
| | UATTAGTGURGUATTTA |
| 138 | TAAATGRGGUAUTAATGGTATGAGAATGGUUUAGGTAGTUAGUTUTTGATTATUAT |
| | ARGGUTUTGATGAGTGUAGGAAUAUAAGGGTTUTTGATUUTGURGURGGTTTAGAT |
| | AAAAUAAUARGGAUAUARGTGGAGTGGTTTTAAGGAGXGGAGAGTTTAATGAGUAA |
| | GAAGGAAGGGAGAAGAUAGAAGGAAGAAGUTUUURGGTAUAGAGAUAUAGGGAG |
| | GGGGGUTUUAAAGUUUAAAGAGGAGGTUUUUAUUTGUAATGGATAUUAGUUTGGT |
| | ATATATGUAAAGAUTGGAGGAGG |
| 139 | AAGGTTAAAGTRGUTGUTAGAUUAAGGUTAAAURGTGGRGAGGTAGTTGUTTGRGU |
| | RGUAGAGTGTGGGTGTGAAUAGUTGGAGUTUAGTGGTTUUTGGAGAUTUAGGGAUU |
| | AUUTGTATTUUAUATURGGUTTUUUAUUUARGUAUAXGUAGTATGAUUTGGGTTTU |
| | UUUTTTATAUAGTGGAATGUTAAGTGUUTAUAUUUTAGURGGGGTUAGUUAAUTAT |
| | GGUUTGTGGGUAUUATUUUAUUTGUAGUUTGTTTTTGAGUTAAGAATGTTGTTGAU |
| | AUTTTTAAAAAUAGAGAAUA |
| 140 | GTTUTUTGTTTTTAAAAGTGTUAAUAAUATTUTTAGUTUAAAAAUAGGUTGUAGGTG |
| | GGATGGTGUUUAUAGGUUATAGTTGGUTGAUUURGGUTAGGGTGTAGGUAUTTAGU |
| | ATTUUAUTGTATAAAGGGGAAAUUUAGGTUATAUTGXGTGTGRGTGGGTGGGAAGU |
| | RGGATGTGGAATAUAGGTGGTUUUTGAGTUTUUAGGAAUUAUTGAGUTUUAGUTGT |
| | TUAUAUUUAUAUTUTGRGGRGUAAGUAAUUTAUUTRGUUARGGTTTAGUUTTGGTUT |
| | AGUAGRGAUTTTAAUUTTG |
| 141 | GAGAUAGGGTTTUAUTUUTGTRGUUUAGGUTGGAGTGUAGUUTUAAUUTUUTGGGU |
| | TUAGTGGATUTTUUUAUUTUAGAUTUUTGAGTAGURGGGAUTAUAGGUAUARGUUA |
| | UUAGGUUTAGUTAATTTTTTGTATTTTTTTGTAGAGAXGAGGTTTRGUTAGGTrGUU |
| | UAGGUTGGTUTUTAAUTUUTGGGUTUAAGXGATUUAUUUAUUTUAGUTTUUUAAAG |
| | TGUTGGGGTTAUAGGUUTGAGTUAUAGXGTURGGUTGAAAGTGAAGTTGAATGAGA |
| | TGAUTRGTUUAGGUUAUAT |
| 142 | ATGTGGUUTGGARGAGTUATUTUATTUAAUTTUAUTTTUAGURGGAXGUTGTGAUT |
| | UAGGUUTGTAAUUUUAGUAUTTTGGGAAGUTGAGGTGGGTGGATXGUTTGAGUUUA |
| | GGAGTTAGAGAUUAGUUTGGGUAAUUTAGRGAAAUUTXGTUTUTAUAAAAAAATA |
| | UAAAAAATTAGUTAGGUUTGGTGGRGTGTGUUTGTAGTUURGGUTAUTUAGGAGTU |
| | TGAGGTGGGAAGATUUAUTGAGUUUAGGAGGTTGAGGUTGUAUTUUAGUUTGGGR |
| | GAUAGGAGTGAAAUUUTGTUTU |
| 143 | AUARGUUAUUAGGUUTAGUTAATTTTTTGTATTTTTTTGTAGAGAXGAGGTTTRGOT |
| | AGGTTGUUUAGGUTGGTUTUTAAUTUUTGGGUTUAAGXGATUUAUUUAUUTUAGUT |
| | TUUUAAAGTGUTGGGGTTAUAGGUUTGAGTUAUAGXGTURGGUTGAAAGTGAAGTT |
| | GAATGAGATGAUTRGTUUAGGUUAUATGGUAATUAGTGGUTGATTGARGUUAAAGT |
| | TGATTTUATTUTTUTUAATGGGTTUAGAGTUUAAATTUTGGAAUUTUAGAAGARGTT |
| | GUTATTUTGGTTUUAAGU |
| 144 | UTTGGAAUUAGAATAGUAARGTUTTUTGAGGTTUUAGAATTTGGAUTUTGAAUUUA |
| | TTGAGAAGAATGAAATUAAUTTTGGRGTUAATUAGUUAUTGATTGUUATGTGGUUT |
| | GGARGAGTUATUTUATTUAAUTTUAUTTTUAGURGGAXGUTGTGAUTUAGGUUTGT |
| | AAUUUUAGUAUTTTGGGAAGUTGAGGTGGGTGGATXGUTTGAGUUUAGGAGTTAGA |
| | GAUUAGUUTGGGUAAUUTAGRGAAAUUTXGTUTUTAUAAAAAAATAUAAAAAATT |
| | AGUTAGGUUTGGTGGRGTGTG |
| 145 | AGTGAUTGUAGRGTUAGGUUAAGUTTGGUUAUTTAUATGTUTGGUATGAUAGTGGU |
| | UTUAGAGTAUTRGTUTGAGAAGAAGAGUTATUAUUTGAGRGUTUTGGAGAAUTTAG |
| | URGGAGUTTTUAGGUAGTUTGGGAGUUTAUATGGAGGXGTGTAGGUTTATGTUTUA |
| | TGTUUARGTTGUURGGGAGAUAAAATUUTTTUTTTATTTAGAGUTGUUUUAAAATG |
| | UTGUAUUAGUTTUTUAUTGRGGTGGUTTUAUUTTAGUATAUAGGTATGTGGARGGU |
| | UAUTGTGUTGGUTUAUUTT |
| 146 | AAGGTGAGUUAGUAUAGTGGURGTUUAUATAUUTGTATGUTAAGGTGAAGUUAUR |
| | GUAGTGAGAAGUTGGTGUAGAAUATTTTGGGGUAGUTUTAAATAGAAAAGGATTTT |
| | GTUTUURGGGUAARGTGGAUATGAGAUATAAGUUTAUAXGUUTUUATGTAGGUTUU |
| | UAGAUTGUUTGAAAGUTURGGUTAAGTTUTUUAGAGRGUTUAGGTGATAGUTUTTU |
| | TTUTUAGARGAGTAUTUTGAGGUUAUTGTUATGUUAGAUATGTAAGTGGUUAAGUT |
| | TGGUUTGARGUTGUAGTUAUT |
| 147 | RGGGUAUUTAGGTUTRGUURGUUTGUAGURGUUTGGGGARGRGGGTTURGGARGGU |
| | TGGRGRGGGGRGGGGRGGGGAUUAURGAGUAGGAAGTUUURGRGGAAGRGURGUR |
| | GGGUAUAGRGTGGGTGUTGTRGAGGAGTGGRGUURGGGXGGGGRGGGAGGTTATA |
| | AATAGRGGURGUUATUUTGUTTUTUTTUAGAUAUAUTTAATTTAGURGGUAGGUAU |
| | ARGGATGUTTATTTTTAAAAAAAGAAUTTGTTTTATTGRGUTRGAGGTGAURGGGAA |
| | GGTGTUUURGRGGGTUAUTRG |
| 148 | RGAGTGAUURGRGGGGAUAUUTTUURGGTUAUUTRGAGRGUAATAAAAUAAGTTUT |
| | TTTTTTAAAAATAAGUATURGTGTGUUTGURGGUTAAATTAAGTGTGTUTGAAGAGA |
| | AGUAGGATGGRGGURGUTATTTATAAUUTUURGUTGUURGGGRGUUAUTUUTRG |
| | AUAGUAUUUARGUTGTGUURGGRGGRGUTTURGRGGGGAUTTUUTGUTRGGTGGTU |
| | UURGUUURGUUURGRGUUAGURGTURGGAAUURGRGTUUUUAGGRGGUTGUAGGR |
| | GGGRGAGAUUTAGGTGUURG |
| 149 | GAAGGTGRGGTGRGGTGAGGTGAGAAGAGAGAURGRGUTAGAUUAGGRGATGTUTT |
| | AGGGARGGGAGAGGGGTGAGGUUUARGGRGGTUUTGGGGAGRGGUUUARGAURGG |
| | UUUARGUAGAGUTTGTAGUUAGTGAAUAGGAAGTATTGGXGAGAGGGAUTGAGAA |
| | AUUUAAGAGAGTGTGGGGTGAGGAAAAGGTUAAGGAAGGUUUAGGUTTUUAGGAA |
| | GGGUUTGGGURGGGGRGGGGRGGGTGGTGGGAGGUAGTGGTTAGGARGGGRGGGG |
| | GTGGGGGTGGGGGTGGGGGTAGGG |
| 150 | UUUTAUUUUUAUUUUUAUUUUUAUUUURGUURGTUUTAAUUAUTGUUTUUUAUUA |
| | UURGUUURGUUURGGUUUAGGUUUTTUUTGGAAGUUTGGGUUTTUUTTGAUUTTTT |
| | UUTUAUUUUAUAUTUTUTTGGGTTTUTUAGTUUUTUTXGUUAATAUTTUUTGTTUAU |
| | TGGUTAUAAGUTUTGRGTGGGURGGTRGTGGGURGUTUUUUAGGAURGURGTGGGU |
| | UTUAUUUUTUTUURGTUUUTAAGAUATRGUUTGGTUTAGRGRGGTUTUTUTTUTUA |
| | TTTTTTTATTRUATURGUAUUTTU |
| 151 | GAGAAAUAAAATAUATTTTTTAATTTAAAAAAAAGTAUUAGAATGAATAAAAUAGG |
| | GGUTTTUUAAAAUTGUTTTTGGTAGATTTAGUAAAUUTAUTGAAUTTTAGAAAUTTTU |
| | ATTTTATAATTGTURGGAGATAGAAAGUAGTGUTTUXGAATAAGTGGATAAUTUTGU |
| | RGGTUUUAGTAGGTGUUATTGGTGAGUAUAUAGGGTTGUTTAAGTUTUTAAGTUAT |
| | TTUUUTGAUTGTGGTTTGAATUAATGTUAAATATUTAUAGGGGTUAGGUAGGTAAU |
| | TUAATGAAGTGAAAUAGG |
| 152 | UTGTUAUTTUATTGAGTTAUUTGUUTGAUUUUTGTAGATATTTGAUATTGATTUA |
| | AAUUAUAGTUAGGGAAATGAUTTAGAGAUTTAAGUAAUUUTGTGTGUTUAUUAATG |
| | GUAUUTAUTGGGAURGGUAGAGTTATUUAUTTATTXGGAAGUAUTGUTTTUTATUT |
| | URGGAUAATTATAAAATGAAAGTTTUTAAGTTUAGTAGGTTTGUTAAATUTAUUAAA |
| | AGUAGTTTTGGAAAGUUUUTGTTTTATTUATTUTGGTAUTTTTTTTTAAAUUAAAAAA |
| | TGTATTTTGTTTUTUT |
| 153 | GGAGGGUTTUAURGTUAGRGTAGRGTARGUUTGRGGGURGGGGRGGGAGAGGGAU |
| | RGTRGRGTTTGTGURGUUAGUAUUTGRGGUUUUUAGRGUAUURGGGUUUUARGRG |
| | GTAGUUUUUAGGGAGTGGGGAGTRGGGRGGGAAAUAGUTXGUURGGGUTUUTARG |
| | GGTGUUUUTTTRGURGRGUTUUUTUURGAGGGTUUTTTGUAGTRGGGRGTGGAAGT |
| | GGGATGAGUAAAUUURGUAGUAUAGGGUUTTRGUUUUAGGAUUTGUAUUUTUTAU |
| | RGGUUARGGGARGTUUUTURGUAU |
| 154 | GTGRGGAGGGARGTUURGTGGURGGTAGAGGGTGUAGGTUUTGGGGRGAAGGUUU |
| | TGTGUTGRGGGGTTTGUTUATUUUAUTTUUARGUURGAUTGUAAAGGAUUUTRGGG |
| | AGGGAGRGRGGRGAAAGGGGUAUURGTAGGAGUURGGGXGAGUTGTTTUURGUUR |
| | GAUTUUUUAUTUUUTGGGGGUTAURGRGTGGGGUURGGGTGRGUTGGGGGURGUA |
| | GGTGUTGGRGGUAUAAARGRGARGGTUUUTUTUURGUUURGGUURGUAGGRGTAR |
| | GUTARGUTGARGGTGAAGUUUTUU |
| 155 | AGAUAUAAAGAGGGRGGAGAGAUAGAUAUAGAAAGAGGGAGAUAGRGGGGUTGG |
| | ATGGARGTGTGGURGGGUUAGTGGGGAGGAGAGARGAGTURGUAGAUAGRGTTUA |
| | GAGGURGRGUTGUTTTGGGTGUTGAGURGTUURGGGGTTUAXGGTRGUAGTTTGTUU |
| | TTAUAAAARGUUUAGURGUUURGAUUTGTGGTGUTTAGGGAGGAUUTAUUTGGUTG |
| | TGURGGTUTGAGAAGGGGUUAGTGAGGUURGGTGRGGGTARGGGRGGGTGUAGAT |
| | GUAGUUAGGAGGARGGGRGGGAGU |
| 156 | GUTUURGUURGTUUTUUTGGUTGUATUTGUAUURGUURGTAUURGUAURGGGUUTU |
| | AUTGGUUUUTTUTUAGAURGGUAUAGUUAGGTAGGTUUTUUUTAAGUAUUAUAGG |
| | TRGGGGRGGUTGGGRGTTTTGTAAGGAUAAAUTGRGAUXGTGAAUUURGGGARGGU |
| | TUAGUAUUUAGGUAGRGRGGUUTUTGAARGUTGTUTGRGGAUTRGTUTUTUUTUUU |
| | UAUTGGUURGGUUAUARGTUUATUUAGUUIRGUTGTUTUUUTUTITUTGTGTUTGT |
| | UTUTURGUUUTUTTTGTGTUT |
| 157 | GUTGTUAUAUTGAGUTGTTTAAUAUTTAAGATGTTGGTGGATGGUAAAGUTAAAAG |
| | AGUATUGTAAUAUATGAUUTUTGGGGUTUURGGAGTUATGAGTAUUUUTTUTAGAU |
| | AUAGURGTGGGGUUAUAUAGAATTUTGUTUUTGUTGUXGUURGGAAGUAUTUATUT |
| | GGUTUUTGUAUUUAUTUAUUTGUATUUTTUUUUTUUUARGAGGTGTTAAGAGUTGT |
| | GGGATGAGTAAAGGAGGUUTGTGAAGGATTTUUTGTTTUAGTUTTAUATTUAGGTUT |
| | GAGTTUTUAGAGGAATUTT |
| 158 | AAGATTUUTUTGAGAAUTUAGAUUTGAATGTAAGAUTGAAAUAGGAAATUUTTUAU |
| | AGGUUTUUTTTAUTUATUUUAUAGUTUTTAAUAUUTRGTGGGAGGGGGAGGATGUA |
| | GGTGAGTGGGTGUAGGAGUUAGATGAGTGUTTURGGGXGGUAGUAGGAGUAGAAT |
| | TUTGTGTGGUUUUARGGUTGTGTUTAGAAGGGGTAUTUATGAUTURGGGAGUUUUA |
| | GAGGTUATGTGTTAUAGTGUUUTTTAGUTTTGUUATUUAUUAAUATUTTAAGTGTT |
| | AAAUAGUTUAGTGTGAUAGU |
| 159 | UAGGGUTGGGAGAATAGGATGGAUAGRGTTTTGUUAGAGUUTUATGGGAAGUTTUU |
| | TTTUAGGUAGUTGAAUUUATTTUAGGGGTAGGGAGUAUTGATUAGGGGTTGGGAUA |
| | TTGUUURGGGAGGAGGATGAGGATGTTTUUAGGUUTXGGUTGAUTUATGGTAGTGA |
| | GTATTAGTUAUTUUUTUAUAAGAATUAGUUUAUATUUTUTAGTAGUUTUTTGTUTU |
| | UUAGAGGUUUUTGUUUUATGTTTAUUTGUUTGAAGUTUUTUTUURGGURGUUUUUA |
| | UUUAUATURGUAUAGTTTGG |
| 160 | UAAAUTGTGRGGATGTGGGTGGGGGRGGURGGGAGAGGAGUTTUAGGUAGGTAAA |
| | UATGGGGUAGGGGUUTUTGGGAGAUAAGAGGUTAUTAGAGGATGTGGGUTGATTUT |
| | TGTGAGGGAGTGAUTAATAUTUAUTAUUATGAGTUAGUXGAGGUUTGGAAAUATUU |
| | TUATUUTUUTUURGGGGUAATGTUUUAAUUUUTGATUAGTGUTUUUTAUUUUTGAA |
| | ATGGGTTUAGUTGUUTGAAAGGAAGUTTUUUATGAGGUTUTGGUAAAARGUTGTUU |
| | ATUUTATTUTUUUAGUUUTGU |
| 161 | GAGGAUTAAAAGAAGUUAGAGATGUTGGTUAATTGAUAUAAAAATAAAGAGUTAA |
| | GGGAGAGGTTGAGAGAGGGAGAGUAATATUTATGGGTGTUTGGAATTTTTAAAGGG |
| | UTUAGAGGAGGAGGGGGURGGGRGTGGTGGUTUAXGUUTGTTATUXGAGUAUTTTG |
| | GGAGGUUAAGGTGGGUAAATUARGAGGTUAGGAGTTTGAGAGUAGUUTGAUUAAU |
| | ATGGTGUAAUUURGTUTUTAUTAAAAATAUAAAATTTAGURGGGTGTGGTTGTGTG |
| | UUTGTAATUUUAGUTAUTUAGG |
| 162 | UUTGAGTAGUTGGGATTAUAGGUAUAUAAUUAUAUURGGUTAAATTTTGTATTTTT |
| | AGTAGAGARGGGGTTGUAUUATGTTGGTUAGGUTGUTUTUAAAUTUUTGAUUTRGT |
| | GATTTGUUUAUUTTGGUUTUUUAAAGTGUTXGGATAAUAGGXGTGAGUUAUUARG |
| | UURGGUUUUUTUUTUUTUTGAGUUUTTTAAAAATTUUAGAUAUUUATAGATATTGU |
| | TUTUUUTUTUTUAAUUTUTUUUTTAGUTUTTTATTTTTGTGTUAATTGAUUAGUATUT |
| | UTGGUTTUTTTTAGTUUTU |
| 163 | UUAGGAGUURGUUTGGGAGRGRGUAGRGUTUTAGGAGURGAGAGURGUTGUTTGG |
| | UUUTRGUTGGURGGGTAAAURGAGGGGAAGUTUUTGGUUTUUTTTUUUTTAAGUUU |
| | UTTATTGUTTUTGTGGGGAAGGUUUTUUTAGGTAGAGGXGAAGGAURGGGGAGATA |
| | AUUTUTUUUATGGGUUAUATURGUTGUUATGGTUTGTGTRGTGUUAGAAGGTAUUT |
| | UTUAGUUUTUAGTGURGTGAAAAATUTGAUAUTUAAGAAGGTRGATTGAUARGUUT |
| | AARGTRGUAUAGUAATTTAGT |
| 164 | AUTAAATTGUTGTGRGARGTTAGGRGTGTUAATRGAUUTTUTTGAGTGTUAGATTTT |
| | TUARGGUAUTGAGGGUTGAGAGGTAUUTTUTGGUARGAUAUAGAUUATGGUAGRG |
| | GATGTGGUUUATGGGAGAGGTTATUTUUURGGTUUTTXGUUTUTAUUTAGGAGGGU |
| | UTTUUUUAUAGAAGUAATAAGGGGUTTAAGGGAAAGGAGGUUAGGAGUTTUUUUT |
| | RGGTTTAUURGGUUAGRGAGGGUUAAGUAGRGGUTUTRGGUTUUTAGAGRGUTGRG |
| | RGUTUUUAGGRGGGUTUUTGG |
| 165 | GAGGUARGAAGUTGURGGAGUTAUTUAGUTTTAUUTUTAGGAAAGATAUAGRGAAT |
| | UAURGUUAATAAAAUAAAGUAAAAUAAAAAGUTRGUUATGUTGAARGGAATGGGA |
| | AAATTGUTUTUTTGTUAUTAATTTTGATTGAATTGAGTXGGUAATUTUTGAAURGGT |
| | TUAUTGATAUAAUAATAGGAAAUATTTAAUTGTTTUTTGUAUUTTTAAAUATAAATA |
| | GTAGGTTTTTAAGUAGTUAGTAGGRGATGTGTGATUAAGGTTUAGAUAGARGUAGA |
| | UAAUTGATUAUUUAUTUAG |
| 166 | UTGAGTGGGTGATUAGTTGTUTGRGTUTGTUTGAAUUTTGATUAUAUATRGUUTAUT |
| | GAUTGUTTAAAAAUUTAUTATTTATGTTTAAAGGTGUAAGAAAUAGTTAAATGTTTU |
| | UTATTGTTGTATUAGTGAAURGGTTUAGAGATTGUXGAUTUAATTUAATUAAAATTA |
| | GTGAUAAGAGAGUAATTTTUUUATTURGTTUAGUATGGRGAGUTTTTTGTTTTGUTT |
| | TGTTTTATTGGRGGTGATTRGUTGTATUTTTUUTAGAGGTAAAGUTGAGTAGUTURG |
| | GUAGUTTRGTGUUT |
| 167 | GAUUTUAGUTURGGGTGAUAURGGTGGGRGTRGGGTGTGGUUTUAGAUAGUTUUUT |
| | TUUTUUURGGUTGGTTGUUAGGTUAAUAURGGGTGGGAUTAGUUTUTGGTGTRGGU |
| | AGTAGUUUUATGUTUURGGUUTTTGGGTTUTTGUATGXGURGTUUUUATUAUUTGG |
| | UTGUUUUTUTUAUTTURGTUTUUAUUTGTUURGGGTUAUUTGTUUTTUAAGUUAGA |
| | AATTAAGGAUAGUAUUUUUTUUUAGAURGUUTGGUTGUAGTUURGGGATGGGRGU |
| | TUUTAGTRGUUTAGATRGGGU |
| 168 | GUURGATUTAGGRGAUTAGGAGRGUUUATUURGGGAUTGUAGUUAGGRGGTUTGG |
| | GAGGGGGTGUTGTUUTTAATTTUTGGUTTGAAGGAUAGGTGAUURGGGAUAGGTGG |
| | AGARGGAAGTGAGAGGGGUAGUUAGGTGATGGGGARGGXGUATGUAAGAAUUUAA |
| | AGGURGGGAGUATGGGGUTAUTGURGAUAUUAGAGGUTAGTUUUAUURGGTGTTG |
| | AUUTGGUAAUUAGURGGGGAGGAAGGGAGUTGTUTGAGGUUAUAUURGARGUUUA |
| | URGGTGTUAUURGGAGUTGAGGTU |
| 169 | GTATUTGTGTUAAUUAGRGGTTUTUAGUUTGGUUTUATUUAGGGUUTGAAGUUTAU |
| | TAUAGAAUUUUUAGUAGUARGTGGGGTGUAUAGUAAAGATUAGUUUTGGAUAUAG |
| | URGGGTGUTUAGGGRGGGGTGAGGGGGUAGGAGGUAGGAXGUAGGAGGTGAGUTG |
| | TURGGGRGGGGUAGGATGAGGGAGTUUTGUATTGUAGAGUTAAGGGGGAGAATUA |
| | TUAGUAUUUTAATTAGUTTTTTGATGGUTTUUAAAGUUTTTTAAGTUUTTTTTTTTTTT |
| | TTTTTTTTTTATUUUTAUAAG |
| 170 | UTTGTAGGGATAAAAAAAAAAAAAAAAAAAAAGGAUTTAAAAGGUTTTGGAAGUU |
| | ATUAAGAGUTAATTAGGGTGUTGATGATTUTUUUUUTTAGUTUTGUAATGUAGGAU |
| | TUUUTUATUUTGUUURGUURGGAUAGUTUAUUTUUTGXGTUUTGUUTUUTGUUUUU |
| | TUAUUURGUUUTGAGUAUURGGUTGTGTUUAGGGUTGATUTTTGUTGTGUAUUUUA |
| | RGTGUTGUTGGGGGTTUTGTAGTAGGUTTUAGGUUUTGGATGAGGUUAGGUTGAGA |
| | AURGUTGGTTGAUAUAGATAU |
| 171 | GATTAAUTTGUUTUUTGAUAAGTUATAUUUTTTAGUTTAGTAUTAAGGUAGAAGAG |
| | AGUUUTGTTGAAGAGUURGUTTGTGTTUTGTGGTAAAGAUAUAGGUUTAURGGUTT |
| | UTUXGTGGGTUUUAGTGUTGAGAAGGGUAUAGGUTGGUTGGAGAUAGTGUUUTGU |
| | TTGAUAGAUUUUTUUAXGUTRGGATUUTTUUAGTUTGUAURGGUUAUUTGUAUTGG |
| | TTTUARGGAAGAGUTAGAATTUTGTTTTAATGTTGGUUAGTTTUUATUATTAGUTTG |
| | AAAAGAAUAUAGAAUTTARG |
| 172 | RGTAAGTTUTGTGTTUTTUUAAGUTAATGATGGAAAUTGGUUAAUATTAAAAUAGA |
| | ATTUTAGUTUTTURGTGAAAUUAGTGUAGGTGGURGGTGUAGAUTGGAAGGATURG |
| | AGXGTGGAGGGGTUTGTUAAGUAGGGUAUTGTUTUUAGUUAGUUTGTGUUUTTUTU |
| | AGUAUTGGGAUUUAXGGAGAAGURGGTAGGUUTGTGTUTTTAUUAUAGAAUAUAA |
| | GRGGGUTUTTUAAUAGGGUTUTUTTUTGUUTTAGTAUTAAGUTAAAGGGTATGAUTT |
| | GTUAGGAGGUAAGTTAATU |
| 173 | GAUUAUAGGTGTGTGUTATUATGUURGGGTAATTTTTATATTTTTTGGTUTUAUTAT |
| | GTTGUUUAGGUTGGTUTUAAAUTUUTGGGUTUAAGTGATUUTUUTGUUTUAGUUTU |
| | UUAAAGTGTTGGATTAGAGGUATGAGUUAUUTTGUAXGTTTGUUTUUTGAUUTUAG |
| | GTUUUUARGGAGTTGGTUATUTTUTGGGUUTRGUTUAGURGGTGUTGAAGGTGAGT |
| | UATGUTRGATGATGAUUTGAGGAGUAGAAGAAGGTGUAGGTGAGTUAUUTGAGGG |
| | GAAUTGGGTUATGAUUAGAG |
| 174 | UTUTGGTUATGAUUUAGTTUUUUTUAGGTGAUTUAUUTGUAUUTTUTTUTGUTUUT |
| | UAGGTUATUATRGAGUATGAUTUAUUTTUAGUAURGGUTGAGRGAGGUUUAGAAG |
| | ATGAUUAAUTURGTGGGGAUUTGAGGTUAGGAGGUAAAXGTGUAAGGTGGUTUAT |
| | GUUTUTAATUUAAUAUTTTGGGAGGUTGAGGUAGGAGGATUAUTTGAGUUUAGGA |
| | GTTTGAGAUUAGUUTGGGUAAUATAGTGAGAUUAAAAAATATAAAAATTAUURGG |
| | GUATGATAGUAUAUAUUTGTGGTU |
| 175 | AGGAAGTRGAGGUTTAGAAGTTGGGTGAUTTGTUAAAGGTRGUUAUUUARGGTGAG |
| | GGUUAGGTTUTGGGAGGGUTGAGGGGUAGGUATGGTGAGUUAGTTURGGGUATGA |
| | GGUAAGGRGTGGUAGGUUTGGGGGUAAAAGUUAUAGUUXGTGTGGAGGGGGTGGG |
| | GGGATRGAGGUUTTTGGGAAGUUTGTGGATTUTGGUTGUAGTGTGGGTGTGAUAUT |
| | GAGTGUTURGGGGAUTURGAGTTATUAUUUAGGUAUTGGUUAGUUUUARGUTUUU |
| | TUUTUUAGGTAUTTGGUTUUUTG |
| 176 | AGGGAGUUAAGTAUUTGGAGGAGGGAGRGTGGGGUTGGUUAGTGUUTGGGTGATA |
| | AUTRGGAGTUUURGGAGUAUTUAGTGTUAUAUUUAUAUTGUAGUUAGAATUUAUA |
| | GGUTTUUUAAAGGUUTRGATUUUUUUAUUUUUTUUAUAXGGGUTGTGGUTTTTGUU |
| | UUUAGGUUTGUUARGUUTTGUUTUATGUURGGAAUTGGUTUAUUATGUUTGUUUUT |
| | UAGUUUTUUUAGAAUUTGGUUUTUAURGTGGGTGGRGAUUTTTGAUAAGTUAUUU |
| | AAUTTUTAAGUUTRGAUTTUUTU |
| 177 | AGUUARGGRGAUUAUUAUUTUUATUUTUUUUUAUUTUUTUUTUUTGUAGGTGGUU |
| | TTTTTGGUUAGTGTGTUTGAGTGUTUAUUTUTTGUTUTAGTGTUUTGGTGUTURGGUT |
| | UTUUTUTTUUTUUTUAUTUTUUTGGGUUTGGGUUTGUXGUTUURGGGUUTUUAGGT |
| | UTAGAUAUAAGGGTTGAATGAUUAGAUTGUTGGTUTGTTUAGTTTUUATGTGGUUT |
| | RGGUUUAUUUUAGUTUTGGUTGUUTUUUUAAAGTUTUAATUARGARGAGATUATA |
| | UAGTAAUTUTGUUUUUTUUUT |
| 178 | AGGGAGGGGGUAGAGTTAUTGTATGATUTRGTRGTGATTGAGAUTTTGGGGAGGUA |
| | GUUAGAGUTGGGGTGGGURGAGGUUAUATGGAAAUTGAAUAGAUUAGUAGTUTGG |
| | TUATTUAAUUUTTGTGTUTAGAUUTGGAGGUURGGGAGXGGUAGGUUUAGGUUUA |
| | GGAGAGTGAGGAGGAAGAGGAGAGURGGAGUAUUAGGAUAUTAGAGUAAGAGGT |
| | GAGUAUTUAGGUAUAUTGGUUAGAAGGUUAUUTGUAGGAGGAGGAGGTGGGGGA |
| | GGATGGAUUTGGTGGTRGURGTGGUT |
| 179 | AAGGTGAATGUTGUAAUUUTUTUTUUTUAGUUUTGUAGURGATUUUTGAUATAAAU |
| | TUUTTGAAGTTUAGTGGUUTUTTTUUATGUAUUTAUUAUUTAUAUUTGUTGU |
| | AAGAAAUUAUAAUUTGGAURGGGAAUAGAAUTGGAXGTGUUAAAATGUUTGAGGA |
| | UAUTTUATXGAATGTGGUTGGUTTGATGGGAAGUTGGUATGAUTAGAAATGTUAGG |
| | AGTUTTUUUTUTXGAGGTTTUAAGUTTTGTGTTTUTGAUTUAATGGTURGGATTGAG |
| | ATUAGATGAGTUAAGTTUA |
| 180 | GAAUTTGAUTUATUTGATUTUAATURGGAUUATTGAGTUAGAAAUAUAAAGUTTGA |
| | AAUUTXGAGAGGGAAGAUTUUTGAUATTTUTAGTUATGUUAGUTTUUUATUAAGUU |
| | AGUUAUATTXGATGAAGTGTUUTUAGGUATTTTGGUAXGTUUAGTTUTGTTUURGGT |
| | UUAGGTTGTGGTTTUTTTGAAAGUAGUAGGTGTAGGTGGTAGGTGUATGGAAAGAG |
| | GUUAUTGAAUTTUAAGGAGTTTATGTUAGGGATRGGUTGUAGGGUTGAGGAGAGAG |
| | GGTTGUAGUATTUAUUTTU |
| 181 | UAGUUUTGUAGURGATUUUTGAUATAAAUTUUTTGAAGTTUAGTGGUUTUTTTUUA |
| | TGUAUUTAUUAUUTAUAUUTGUTGUTTTUAAAGAAAUUAUAAUUTGGAURGGGAA |
| | UAGAAUTGGAXGTGUUAAAATGUUTGAGGAUAUTTUATXGAATGTGGUTGGUTTGA |
| | TGGGAAGUTGGUATGAUTAGAAATGTUAGGAGTUTTUUUTUTXGAGGTTTUAAGUT |
| | TTGTGTTTUTGAUTUAATGGTURGGATTGAGATUAGATGAGTUAAGTTUAGATGAUU |
| | ATGUAAAUUTTTAGATGGGG |
| 182 | UUUUATUTAAAGGTTTGUATGGTUATUTGAAUTTGAUTUATUTGATUTUAATURGGA |
| | UUATTGAGTUAGAAAUAUAAAGUTTGAAAUUTXGAGAGGGAAGAUTUUTGAUATTT |
| | UTAGTUATGUUAGUTTUUUATUAAGUUAGUUAUATTXGATGAAGTGTUUTUAGGUA |
| | TTTTGGUAXGTUUAGTTUTGTTUURGGTUUAGGTTGTGGTTTUTTTGAAAGUAGUAG |
| | GTGTAGGTGGTAGGTGUATGGAAAGAGGUUAUTGAAUTTUAAGGAGTTTATGTUAG |
| | GGATRGGUTGUAGGGUTG |
| 183 | UUTAUUAUUTAUAUUTGUTGUTTTUAAAGAAAUUAUAAUUTGGAURGGGAAUAGAAUTGGA |
| | XGTGUUAAAATGUUTGAGGAUAUTTUATXGAATGTGGUTGGUTTGATGGGAAGUTGGUATG |
| | AUTAGAAATGTUAGGAGTUTTUUUTUTXGAGGTTTUAAGUTTTGTGTTTUTGAUTUAATGGTU |
| | RGGATTGAGATUAGATGAGTUAAGTTUAGATGAUUATGUAAAUUTTTAGATGGGGUUTAAAA |
| | UUAAATUTGTGTTUTTAAAUUATTUUAAATGTGTTUATUAUUAGTTATAGTTT |
| 184 | AAAUTATAAUTGGTGATGAAUAUATTTGGAATGGTTTGAGAAUAUAGATTTGGTTTTAGGUU |
| | UUATUTAAAGGTTTGUATGGTUATUTGAAUTTGAUTUATUTGATUTUAATURGGAUUATTGA |
| | GTUAGAAAUAUAAAGUTTGAAAUUTXGAGAGGGAAGAUTUUTGAUATTTUTAGTUATGUUA |
| | GUTTUUUATUAAGUUAGUUAUATTXGATGAAGTGTUUTUAGGUATTTTGGUAXGTUUAGTTU |
| | TGTTUURGGTUUAGGTTGTGGTTTUTTTGAAAGUAGUAGGTGTAGGTGGTAGG |
| 185 | GAGAGGGGAAGGGGURGAUUAUUTGUTUURGAGUUATTUTRGGGUTRGGUUAGUU |
| | ATTGGGUTGGGAAUUTGTUAATUUTGGTTGATUTTUUAATGAGUTGTGAAUTGGTUT |
| | TURGGGAGGAUTTAUAGGAGGUTGGAAARGGGGUUTGGXGRGRGUTTUUUTUTUAG |
| | TGRGAGGUTGAUTGGTTGGAUTRGURGGGUTUTAUTGTGGGUUUUARGUTATGTTT |
| | AGARGUURGARGTGTUUUATTTTATTGAAUTRGTUUTGUUUUUUAAGTAGGGARGA |
| | TTTAUUTUUATTTTUTAGAT |
| 186 | ATUTAGAAAATGGAGGTAAATRGTUUUTAUTTGGGGGGUAGGARGAGTTUAATAAA |
| | ATGGGAUARGTRGGGRGTUTAAAUATAGRGTGGGGUUUAUAGTAGAGUURGGRGA |
| | GTUUAAUUAGTUAGUUTRGUAUTGAGAGGGAAGRGRGXGUUAGGUUURGTTTUUA |
| | GUUTUUTGTAAGTUUTUURGGAAGAUUAGTTUAUAGUTUATTGGAAGATUAAUUAG |
| | GATTGAUAGGTTUUUAGUUUAATGGUTGGURGAGUURGAGAATGGUTRGGGAGUA |
| | GGTGGTRGGUUUUTTUUUUTUTU |
| 187 | RGGGGGUAGGGAGUAGAUUTGAUTUAGTGGRGTUAGTGUTAUTTUAAAGRGGUAG |
| | RGUATTTUATTAAAAATUTGATGTAGAAATTAUUUTGGGUTTTGTTTTGUAAAGAGU |
| | ATTTGUATAAGAAAAAATAATUAGURGGTTAATTUUUUXGTUUAUTGGUAGGAAGA |
| | GAGAUAGUUTTUAGAGAGTTTGGGAUTUTUTUATTUURGGAGAATTAAAAGUUTUR |
| | GAGAUATUUATTTTAGAAGTTUTGGTUAATRGTTUTTAAAGTGRGGTUAGAAGAUU |
| | UUTTGRGTUTGAATGGTTTG |
| 188 | UAAAUUATTUAGARGUAAGGGGTUTTUTGAURGUAUTTTAAGAARGATTGAUUAGA |
| | AUTTUTAAAATGGATGTUTRGGAGGUTTTTAATTUTURGGGAATGAGAGAGTUUUA |
| | AAUTUTUTGAAGGUTGTUTUTUTTUUTGUUAGTGGAXGGGGGAATTAAURGGUTGA |
| | TTATTTTTTUTTATGUAAATGUTUTTTGUAAAAUAAAGUUUAGGGTAATTTUTAUAT |
| | UAGATTTTTAATGAAATGRGUTGURGUTTTGAAGTAGUAUTGARGUUAUTGAGTUA |
| | GGTUTGUTUUUTGUUUURG |
| 189 | UAGTGTTGTAGAUUTATTAATTATUAGGATAATTARGGARGGGGAAATUUAGAUAU |
| | AGATAUAATUAGTGUUUTUUTUUAUUTUUURGUAUARGUUUUTUURGGTUTUUUTG |
| | AUATUUTGGTGTGUAUTGTGTTUUUUTGUUATUTUUAXGUTGRGGUTUUTAUTAGA |
| | UUUAUUUUTGURGGTGUUAAAATGUUUAAAGGAAGGUTGAGTUATGUTUTGGUUT |
| | GUUUAGURGUAATAGTUATGUTGUAAUTUUUARGGAAAAUUTUUTTTUAUUUAUTU |
| | UAGAGGTUTGAGAUAUUUTAA |
| 190 | TTAGGGTGTUTUAGAUUTUTGGAGTGGGTGAAAGGAGGTTTTURGTGGGAGTTGUA |
| | GUATGAUTATTGRGGUTGGGUAGGUUAGAGUATGAUTUAGUUTTUUTTTGGGUATT |
| | TTGGUAURGGUAGGGGTGGGTUTAGTAGGAGURGUAGXGTGGAGATGGUAGGGGA |
| | AUAUAGTGUAUAUUAGGATGTUAGGGAGAURGGGAGGGGRGTGTGRGGGGAGGTG |
| | GAGGAGGGUAUTGATTGTATUTGTGTUTGGATTTUUURGTURGTAATTATUUTGATA |
| | ATTAATAGGTUTAUAAUAUTG |
| 191 | GGAAGGAGRGAGUTTUTTTTTATAGGAGUTUUAGTTUUTRGTTTTGTTUTUTTRG |
| | TTATTUTUUAAAGAAAGURGGUTUTTGAGTUAGUTGGUAGGAGAGRGAGGRGAATG |
| | RGUTGGTGUTGGURGUAATGGUUURGGTTUAARGUTXGUTUUAGUTGGTUARGTUU |
| | TUAURGGGGRGGURGGRGGUUTGUUTGUUUARGUTUTGUUAGGAGUUUAGGTUAG |
| | UUUTTGUUTRGURGGGGURGGAGUURGTUUAAAATUAAUAAGTUTTTTGTGUUTUT |
| | UUTTTGGARGUTGTATAATT |
| 192 | AATTATAUAGRGTUUAAAGGAGAGGUAUAAAAGAUTTGTTGATTTTGGARGGGUTU |
| | RGGUUURGGRGAGGUAAGGGUTGAUUTGGGUTUUTGGUAGAGRGTGGGUAGGUAG |
| | GURGURGGURGUUURGGTGAGGARGTGAUUAGUTGGAGXGAGRGTTGAAURGGGG |
| | UUATTGRGGUUAGUAUUAGRGUATTRGUUTRGUTUTUUTGUUAGUTGAUTUAAGAG |
| | URGGUTTTUTTTGGAGAATAAUURGAAGAGAAUAAAARGAGGAAUTGGAGUTUUTA |
| | TAAAAAGAAGUTRGUTUUTTUU |
| 193 | UTGGTTGTGGAAGGAGRGAGUTUTURGTUUURGGGAGTATGUAAGTTTUUUUTUUA |
| | RGATUAUTTGGAAGGGATTGGGRGGAGTTUTGTUATTTGGAGAAAGGGTUUTGGGA |
| | GUTTUAGGTTTGTGTAGGGRGAGGARGGGGRGGTTUTGXGTURGGUUAGGTTGGUU |
| | UTRGAGGAUUUAGURGTUUUUAAUUTUUTAAAUTGUTGTRGGATGTAGAAGAUTRG |
| | UATTUAUTGUTUTUUAUAGTRGGTGAAGGGAGAARGURGAAAAGGGURGUATTUUU |
| | TUUTGURGGTUUUUTUUUUT |
| 194 | AGGGGAGGGGAURGGUAGGAGGGAATGRGGUUUTTTTRGGRGTTUTUUUTTUAURG |
| | AUTGTGGAGAGUAGTGAATGRGAGTUTTUTAUATURGAUAGUAGTTTAGGAGGTTG |
| | GGGARGGUTGGGTUUTRGAGGGUUAAUUTGGURGGAXGUAGAAURGUUURGTUUT |
| | RGUUUTAUAUAAAUUTGAAGUTUUUAGGAUUUTTTUTUUAAATGAUAGAAUTURG |
| | UUUAATUUUTTUUAAGTGATRGTGUAGUUUAAAUTTGUATAUTUURGGGGARGGAG |
| | AGUTRGUTUUTTUUAUAAUUAG |
| 195 | GGGTGTUAGGUTAUUUTTGAAGGGAUUTAUUTUUTUUAGUUAUTGUUAUTGGAUU |
| | UTUUUTUAGUUUUTUTAGUAAAGUAGUUUUAATGUATGTUUTGAGATTGTUURGGA |
| | AAAUTGTUAUTUAGAGGGGAAGAUTUTTGGGUAUAGAGUXGTTATTTATAAUAGUA |
| | AGAUAUTGUAGGUTGUUTAAAUAUTUUARGAUAGAGATGARGGAGUAATTUARGG |
| | UAUUUUTGUUAAGAGAGTATTAUAUAGUUATTAAAAATGATUAAGUAGAGAURGG |
| | TAGTGARGUTGAGTAATGTTTTU |
| 196 | GAAAAUATTAUTUAGRGTUAUTAURGGTUTUTGUTTGATUATTTTTAATGGUTGTGT |
| | AATAUTUTUTTGGUAGGGGTGURGTGAATTGUTURGTUATUTUTGTRGTGGAGTGTT |
| | TAGGUAGUUTGUAGTGTUTTGUTGTTATAAATAAXGGUTUTGTGUUUAAGAGTUTT |
| | UUUUTUTGAGTGAUAGTTTTURGGGAUAATUTUAGGAUATGUATTGGGGUTGUTTT |
| | GUTAGAGGGGUTGAGGGAGGGTUUAGTGGUAGTGGUTGGAGGAGGTAGGTUUUTT |
| | UAAGGGTAGUUTGAUAUUU |
| 197 | GUUUAURGRGGAGGGUUUUUUTATUUTUUTUATUUTUAUTGGUTUAUUUAGGGUA |
| | UUAUUAUUTUUTUUAGGAAAUUUTUUUTGUUUUUTATUTUTGGGTGTUTUAUAUUU |
| | TGGGUAUUTAUAGUUAGAAUUUUAUUTURGGGUUUTUXGTTTUUAGTGGUTGAGT |
| | AGGAGUTTUAGTTTTAGGAGAUTUUUUTGAGUAGAAURGAUUUUTUTTUATUTTUU |
| | UAAUUUUUAUUUAUAUAUTUAGGAUTGGGTAURGGGGUUTGUUUUAATTTGUAGG |
| | UTTAGAGTUAGGGGTTAGGGTGG |
| 198 | UAUUUTAAUUUUTGAUTUTAAGUUTGUAAATTGGGGUAGGUUURGGTAUUUAGTU |
| | UTGAGTGTGTGGGTGGGGGTTGGGAAGATGAAGAGGGGTRGGTTUTGUTUAGGGGA |
| | GTUTUUTAAAAUTGAAGUTUUTAUTUAGUUAUTGGAAAXGGAGGGUURGGAGGTG |
| | GGGTTUTGGUTGTAGGTGUUUAGGGTGTGAGAUAUUUAGAGATAGGGGGUAGGGA |
| | GGGTTTUUTGGAGGAGGTGGTGGTGUUUTGGGTGAGUUAGTGAGGATGAGGAGGAT |
| | AGGGGGGUUUTURGRGGTGGGUA |
| 199 | UTTAAATGAGAAGAAUATGTTTUTAUAURGUATTTGTGAAAGTTTGGUTRGGAGUTA |
| | RGRGUTGATTAATATUAGATUTUUTTUAUTRGUUTRGUUAUAATUTTGTUAUATUTG |
| | GUTGAUAAATUURGAGGAAUTURGGUAAAGUUAGGXGGRGGRGGGGUTURGGGTU |
| | TGGGRGGRGGUTURGGAGGAGUAGRGGGAGAUUURGUAGRGGUUTUUTUUTTUTU |
| | RGUURGRGGUUUUUAGUUTRGURGURGURGUURGGUTUUUAGUARGGAAURGARG |
| | GGGRGUTUURGAGARGGGRGA |
| 200 | TRGUURGTUTRGGGAGRGUUURGTRGGTTURGTGUTGGGAGURGGGRGGRGGRGGR |
| | GAGGUTGGGGGURGRGGGRGGAGAAGGAGGAGGURGUTGRGGGGTUTUURGUTGU |
| | TUUTURGGAGURGURGUUUAGAUURGGAGUUURGURGUXGUUTGGUTTTGURGGA |
| | GTTUUTRGGGATTTGTUAGUUAGATGTGAUAAGATTGTGGRGAGGRGAGTGAAGGA |
| | GATUTGATATTAATUAGRGRGTAGUTURGAGUUAAAUTTTUAUAAATGRGGTGTAG |
| | AAAUATGTTUTTUTUATTTAAG |
| 201 | GTGGTAGGTUTGTGTGGAGAUTTGAATUUTGTTTTUTUUUAGUUTTTTUUAUUAAGG |
| | AUAUUUAGGAGAGUAAGGATATGGUUAGAGGAGAGGTGGTGTTUUUUTUTTGAUT |
| | GGGUUUTGUTUTUAGUUUUAUAGGTGATURGGAAGATTXGGGTGGAGUAGTTTUUT |
| | GATGUUTURGGTAGUUTGAAGUTGTGGTGUUAGTTTTTUAAUATTUTTAGTGAUTUA |
| | GTUTTGAUATGGGUUAAGGATUAGRGUUUAGTGGGRGAGGTGGGUAGGAGGTAAG |
| | UUAARGAUAUUAUTGUUAUU |
| 202 | GGTGGUAGTGGTGTRGTTGGUTTAUUTUUTGUUUAUUTRGUUUAUTGGGRGUTGAT |
| | UUTTGGUUUATGTUAAGAUTGAGTUAUTAAGAATGTTGAAAAAUTGGUAUUAUAGU |
| | TTUAGGUTAURGGAGGUATUAGGAAAUTGUTUUAUUXGAATUTTURGGATUAUUTG |
| | TGGGGUTGAGAGUAGGGUUUAGTUAAGAGGGGAAUAUUAUUTUTUUTUTGGUUAT |
| | ATUUTTGUTUTUUTGGGTGTUUTTGGTGGAAAAGGUTGGGAGAAAAUAGGATTUAA |
| | GTUTUUAUAUAGAUUTAUUAU |
| 203 | TGUUTAUUAUAUUTRGTGGGTGAAAUAGATATTTRGAGUATGAUTGAGUTTATTAA |
| | GAGUUUTGRGGRGUTTUUTUTGURGGGGGTTTAGAAATTTUAAAGGATGGGGGTTG |
| | AGGGAGGGAGGAGTTATGGGUATGTGATGTGGAUAGGGXGGGUAGGAGGATGGAA |
| | GTAAUAGGTUUAAAATGTATUTTTGGTGGUURGGUAGAGUTUTTGUATGGGGTGAG |
| | AATGGTAATTTAGGAAGAGUAAGTUTTUUUATUTGTGAAGUAGAAGAAAAAAGTGG |
| | AUTTAAGGAGAAGTTRGGGTG |
| 204 | UAUURGAAUTTUTUUTTAAGTUUAUTTTTTTUTTUTGUTTUAUAGATGGGAAGAUTT |
| | GUTUTTUUTAAATTAUUATTUTUAUUUUATGUAAGAGUTUTGURGGGUUAUUAAAG |
| | ATAUATTTTGGAUUTGTTAUTTUUATUUTUUTGUUXGUUUTGTUUAUATUAUATGU |
| | UUATAAUTUUTUUUTUUUTUAAUUUUUATUUTTGAAATTTUTAAAUUUURGGUAG |
| | AGGAAGRGURGUAGGGUTUTTAATAAGUTUAGTUATGUTRGAAATATUTGTTTUAU |
| | UUARGAGGTGTGGTAGGUA |
| 205 | GAGUUAAUUTUTUUTTTUATTUUTGGAGGTGGGGGAUURGUUUTUATUTUAGGUUT |
| | GAAGAGGGUTGTGTGTGAGTTUTUUAUTTGTGTGTGGGGTGAGUURGGUUUATGUA |
| | UAUAGUTAUAUAUAUATUAUAUAUUUAUAUURGGAUAXGRGUUTUAGGTUUUUAU |
| | AUTGUUUTTAUAUAUATGRGUUUUTUAUAUATGUATGTUUUUTTTGUAUAUARGUU |
| | UUUTRGUAUARGUATGUUUUUTRGUAUARGUATGUAUAUAGGUTUAUTUTGUTGU |
| | UTGTUUUTGGUTGUTGTGTGUT |
| 206 | AGUAUAUAGUAGUUAGGGAUAGGUAGUAGAGTGAGUUTGTGTGUATGRGTGTGRG |
| | AGGGGGUATGRGTGTGRGAGGGGGRGTGTGTGUAAAGGGGAUATGUATGTGTGAGG |
| | GGRGUATGTGTGTAAGGGUAGTGTGGGGAUUTGAGGRGXGTGTURGGGTGTGGGTG |
| | TGTGATGTGTGTGTAGUTGTGTGUATGGGURGGGUTUAUUUUAUAUAUAAGTGGAG |
| | AAUTUAUAUAUAGUUUTUTTUAGGUUTGAGATGAGGGRGGGTUUUUUAUUTUUAG |
| | GAATGAAAGGAGAGGTTGGUTU |
| 207 | UUUARGGGGGUAGGUAURGGAGGGGGTGUUUAUAGAGGATAGAGGARGURGAGA |
| | AGTGAUUTGGGGAGUUATAGGATGAGGAAGAGAGAAGAGATGAUAGUAGGGGUTG |
| | TAGGAGGTUAUUUTUUARGGAGGGAGGGGTGARGGUAGAGGXGTURGUAGGAGUT |
| | GGTAURGGTGGGGUTGUUUUUAGGGGGGGUTGAUAGAGGUAGUAAUTGAGUAGGU |
| | AGGGGTGGAGRGAGGTGUUAGUUTGURGTGGAAAGGAGARGUUAGUAGRGGGGGG |
| | UUUTUUTGGGGTUUUAGTUUTGUTUT |
| 208 | AGAGUAGGAUTGGGAUUUUAGGAGGGUUUUURGUTGUTGGRGTUTUUTTTUUARG |
| | GUAGGUTGGUAUUTRGUTUUAUUUUTGUUTGUTUAGTTGUTGUUTUTGTUAGUUUU |
| | UUUTGGGGGUAGUUUUAURGGTAUUAGUTUUTGRGGAXGUUTUTGURGTUAUUUU |
| | TUUUTURGTGGAGGGTGAUUTUUTAUAGUUUUTGUTGTUATUTUTTUTUTUTTUUTU |
| | ATUUTATGGUTUUUUAGGTUAUTTUTRGGRGTUUTUTATUUTUTGTGGGUAUUUUU |
| | TURGGTGUUTGUUUURGTGGG |
| 209 | TGAUAUTUAGGATUUAAAAGUTAGUUUTGUUUAUUUUAGUUUUTUUAUUTUUTTA |
| | UUTGGGTGTGUAUUTGUTURGGGGGGTGGAGGTGUTUUUUAUAGTURGGGUUAGG |
| | AUAGUUTUAGGGGAGAGTGAAGGUUTGUAGGAGGGUAGGXGAGAUAAGGAGGGT |
| | GTUUAGGGUTAGGGAGTGURGGATGAAAUUAGUTUTGTUUUTGTGUAGGUTUUAG |
| | GUTUURGUUTGAUAAAUAGGUAGGGAGUUAUAGTUAGGGAUAATAAAAAUTTGGT |
| | GUAUTUTGAAAGUAGUAUTTGGAUAG |
| 210 | TGTUUAAGTGUTGUTTTUAGAGTGUAUUAAGTTTTTATTGTUUUTGAUTGTGGUT |
| | UTGUUTGTTTGTUAGGRGGGAGUUTGGAGUUTGUAUAGGGAUAGAGUTGGTTTUAT |
| | URGGUAUTUUUTAGUUUTGGAUAUUUTUUTTGTUTXGUUTGUUUTUUTGUAGGUUT |
| | TUAUTUTUUUUTGAGGUTGTUUTGGUURGGAUTGTGGGGAGUAUUTUUAUUUUURG |
| | GAGUAGGTGUAUAUUUAGGTAAGUAGGTUUAGGGGUTGGGGTGGGUAGGGUTAGU |
| | TTTTGGATUUTGAGTGTUAU |
| 211 | UAAATAAGTAGTTAUUTUAGAAGTUAUTTARGTAAAAGAUTUATTUUUUAAAARGU |
| | UAGGUAUATGGATTATUAUTGTGTTATTUAARGARGATAUAATGGUAUAGAATGTA |
| | TUATAUTGAGAAGTGAGTGUUUTUTURGGGAUATAUTXGTUAGTGAGTUATUUAGU |
| | AUTAGAAUAUTGGAGATATAAATAAATAUUAUUTUTTUTAAAAUAGTUTGAAATTU |
| | AAGTGGTUATAAUUTAGAGUATUATGGURGGGUATGGTGGUTUATGUUTGTAAUUU |
| | UAGUATGAGGUTGAGATGGG |
| 212 | UUATUTUAGUUTUATGUTGGGGTTAUAGGUATGAGUUAUUATGUURGGUUATGATG |
| | UTUTAGGTTATGAUUAUTTGAATTTUAGAUTGTTTTAGAAGAGGTGGTATTTATTTAT |
| | ATUTUUAGTGTTUTAGTGUTGGATGAUTUAUTGAXGAGTATGTUURGGAGAGGGUA |
| | UTUAUTTUTUAGTATGATAUA1TUTGTGUUATTGTATRGTRGTTGAATAAUAUAGTG |
| | ATAATUUATGTGUUTGGRGTTTTGGGGAATGAGTUTTTTARGTAAGTGAUTTUTGAG |
| | GTAAUTAUTTATTTGA |
| 213 | GTUUTUAUATTTGAUTURGGATAAAUUTUTTUAAATATTTTAUAGAUTUTGGUTTTU |
| | TRGTTAAUAAGUAGUTUAUAUATATAGTGTUTUAGUAGTGAUAGATGUTGGUUUAU |
| | UURGAGGTUAGGATGAUTUAGUAGGGATTGAGTTTGXGGGRGTUATGUTUUAAGGU |
| | URGGAATAGGAGUTTGGTGUTUATTUUTUAUATAGTGGGUAAATUUTAGGGUAGGG |
| | GAGGGGGGGUAATGUUAGAGAATGGTUUUUAUUTGGGGRGGTUTGARGGUUAGAG |
| | ATGUAGAGAAAGAGARGUUT |
| 214 | AGGRGTUTUTTTUTUTGUATUTUTGGURGTUAGAURGUUUUAGGTGGGGAUUATTU |
| | TUTGGUATTGUUUUUUUTUUUUTGUUUTAGGATTTGUUUAUTATGTGAGGAATGAG |
| | UAUUAAUUTUUTATTURGGGUUTTGGAGUATGARGUUXGUAAAUTUAATUUUTGUT |
| | GAGTUATUUTGAUUTRGGGGTGGGUUAGUATUTGTUAUTGUTGAGAUAUTATATGT |
| | GTGAGUTGUTTGTTAARGAGAAAGUUAGAGTUTGTAAAATATTTGAAGAGGTTTATU |
| | RGGAGTUAAATGTGAGGAU |
| 215 | GAAAGUAGUUUTUTUUUTGUUUTGTAAGGTGATUUURGATURGGGAATTUUUAUTT |
| | UTGAAGGARGTTUTGGAAAAGTGUAUAGATTAAUTGAGATTUUTGUTTUTGGATUA |
| | AGUAUTUUTGAUAUTATXGTTURGATTTTUTAAAAAAGAGATTGTGGUAAAATUTA |
| | UUTXGTGAGATUAGAAAATGUAGUAGGGATGAATUAURGGUUUTUTUAGAUUTUA |
| | UUAGUUTUUAGGUUATTUUTAAGAGUUTUAUTUUTURGTTUTGTTGGUAGTGGGGG |
| | AGGTARGGGGURGGATGGUA |
| 216 | TGUUATURGGUUURGTAUUTUUUUUAUTGUUAAUAGAARGGAGGAGTGAGGUTUT |
| | TAGGAATGGUUTGGAGGUTGGTGAGGTUTGAGAGGGURGGTGATTUATUUUTGUTG |
| | UATTTTUTGATUTUAUXGAGGTAGATTTTGUUAUAATUTUTTTTTTAGAAAATRGGA |
| | AXGATAGTGTUAGGAGTGUTrGATUUAGAAGUAGGAATUTUAGTTAATUTGTGUAU |
| | TTTTUUAGAARGTUUTTUAGAAGTGGGAATTUURGGATRGGGGATUAUUTTAUAGG |
| | GUAGGGAGAGGGUTGUTTTU |
| 217 | AAGAAAAGAGAAAGUUUATUUAGGTAAGGGUAGUUTGGTGAUTATTAUUUTGGGGAGAUTU |
| | UUUAUUUAUAUTGUUAUTUUAGGUTUAUURGAGGGUTGUAGUTTUUTURGGATGGATUUAG |
| | GGXGGUTAUTGGTUUUAGAGUTGGGGGUTGAGTGGGUURGTGUXGAGGGUTGTGGXGTUTG |
| | AUAAGURGGUTUUUAUTGTGAGUAGGGAAGGGRGGATGGGRGGGGGUUARGGUTGUUUTGG |
| | UTUUUUAUUUTGUTGTGUTTUTUTUTAUTUUUUTGUUUTGUUTUUTAAUAUUUAGT |
| 218 | AUTGGGTGTTAGGAGGUAGGGUAGGGGAGTAGAGAGAAGUAUAGUAGGGTGGGGAGUUAG |
| | GGUAGURGTGGUUUURGUUUATURGUUUTTUUUTGUTUAUAGTGGGAGURGGUTTGTUAGA |
| | XGUUAUAGUUUTXGGUARGGGUUUAUTUAGUUUUUAGUTUTGGGAUUAGTAGUXGUUUTG |
| | GATUUATURGGAGGAAGUTGUAGUUUTRGGGTGAGUUTGGAGTGGUAGTGTGGGTGGGGAG |
| | TUTUUUUAGGGTAATAGTUAUUAGGUTGUUUTTAUUTGGATGGGUTTTUTUTTTTTTIT |
| 219 | UTGAGGUAGGGUTGUAGGUTUAGGAGGAGGAGATGGGTGGAGAGAGAAUAAGUTTT |
| | AUUURGGGAGGGTGAUTAUAGGAGAAATGGGUUUUTUAAGTATGUTGATTTUXGU |
| | UTUAUTGUTGUUTGTUUTUXGUUUAUUTURGGUTUTGGUTUATUTGUTUTTGTAAG |
| | UAGGGTUUTGGGUTGGGTGUTGUAGGXGUATGAGGAAAGTGGGAGURGGGARGGG |
| | GUAGUTUAGGGUARGUUUTUUAAUAUTGRGUTURGAGGAUUTUAGRGGTTTTAUTU |
| | AGGGGTGUUAUTGAGGUAUAGU |
| 220 | GUTGTGUUTUAGTGGUAUUUUTGAGTAAAAURGUTGAGGTUUTRGGAGRGUAGTGT |
| | TGGAGGGRGTGUUUTGAGUTGUUURGTUURGGUTUUUAUTTTUUTUATGXGUUTGU |
| | AGUAUUUAGUUUAGGAUUUTGUTTAUAAGAGUAGATGAGUUAGAGURGGAGGTGG |
| | GXGGAAGAGUAGGUAGUAGTGAGGXGGAAATUAGUATAUTTGAGGGGUUUATTTU |
| | TUUTGTAGTUAUUUTUURGGGGTGAGUTTGTTUTUTUTUUAUUUATUTUUTUUTUUT |
| | GAGUUTGUAGUUUTGUUTUAG |
| 221 | GUUUAGGUTGGAGTGUAGTGGRGTGATUTTGGUTUAUTGUAAUUTUTGUUTUURGG |
| | GTTUAAGRGATTUTULTTGUUTUAGUUTUUUAGATAUUTGGGATTAUAGGTGTGTGA |
| | UAUUATAUUUAGUTAATTTTTGTATTTTTAGTAGAGAXGGUUATGTTAGTUAGGUTG |
| | GTUTTGAAUTUUTGAUUTUAGTGATTUAURGGUUTUAGUUUUUAAAGTGUTGGTAT |
| | TATAGTUATGAGUUAUTGUAUURGGUUTUTGUTTTTGUTTUUTTAGTGGUATUUUAU |
| | TGUUTTGUTTTUAAUATT |
| 222 | AATGTTGAAAGUAAGGUAGTGGGATGUUAUTAAGGAAGUAAAAGUAGAGGURGGG |
| | TGUAGTGGUTUATGAUTATAATAUUAGUAUTTTGGGGGUTGAGGURGGTGAATUAU |
| | TGAGGTUAGGAGTTUAAGAUUAGUUTGAUTAAUATGGUXGTUTUTAUTAAAAATAU |
| | AAAAATTAGUTGGGTATGGTGTUAUAUAUUTGTAATUUUAGGTATUTGGGAGGUTG |
| | AGGUAGGAGAATRGUTTGAAUURGGGAGGUAGAGGTTGUAGTGAGUUAAGATUAR |
| | GUUAUTGUAUTUUAGUUTGGGU |
| 223 | GUUAUTUTATAAAAATGAAGAGUAGAGUTRGAGTGUTTATAAUARGTUATTTTTAU |
| | UUAAGAUAGAGAAGAAAAARGAAAGAGAGUUTGAGUATTUUTTTGAUTUUUTUUA |
| | UUUURGGAAGGTATATTUAGAGTUTUUAAGAUTGUUTUXGUUUAUTUAUATGTTrA |
| | TGGUURGGTGAGAURGUATUUTUUUTTTUTATATUTGTUUUTTTTUTGGATGUAGGG |
| | AUAUAGAATUUUUTAAGTGGGAAGAGUTTTGGAGTGGAGGUTGTTUAAAGTTUTGT |
| | GGTGATTAATTATTAUUTAU |
| 224 | TAGGTAATAATTAATUAUUAUAGAAUTTTGAAUAGUUTUUAUTUUAAAGUTUTTUU |
| | UAUTTAGGGGATTUTGTGTUUUTGUATUUAGAAAAGGGAUAGATATAGAAAGGGAG |
| | GATGRGGTUTUAURGGGUUATAAAUATGTGAGTGGGXGGAGGUAGTUTTGGAGAUT |
| | UTGAATATAUUTTURGGGGGTGGAGGGAGTUAAAGGAATGUTUAGGUTUTUTTTRG |
| | TTTTTUTTUTUTGTUTTGGGTAAAAATGARGTGTTATAAGUAUTRGAGUTUTGUTUTT |
| | UATTTTTATAGAGTGGUT |
| 225 | ATTAAAAUAGUAAAUTUUAGGUUUAAAGTAGGTTTUAGTUTUTATTAAGATAAUAA |
| | AAGGTUUTAAATGUUAGGUUTGGGRGUAAAUTGTGUAGAUAAGRGGGTGGURGGA |
| | GAAGGAGGGGGGTUAAGGAAGAGAGGGAAAUTUAATTGAXGGTTAUTTTTTTTTUA |
| | GAGTTATTTURGGTGGGTUTGUUUUUAUUUUTUAAUAAATTTTGTTGUTUTGA |
| | TUUAGGUATAAAAAGTGAGGUUUTGGAGGGUUUUTGAGAUUAGRGTUUTGUAUAG |
| | TGAUATGGUAUAGTGAUATGG |
| 226 | UUATGTUAUTGTGUUATGTUAUTGTGUAGGARGUTGGTUTUAGGGGUUUTUUAUUG |
| | UUTUAUTTTTTATGUUTGGAATGUUUAGAGUAAUAAAATTrGTTGAGGGGTGGGGG |
| | UAGAUUUAURGGAAATAAUTUTGAAAAAAAAGTAAUXGTUAATTGAGTTTUUUTUT |
| | UTTUUTTGAUUUUUUTUUTTUTURGGUUAUURGUTTGTUTGUAUAGTTTGRG |
| | GGUUTGGUATTTAGGAUUTTTTGTTAUTTTAATAGAGAUUGAAAUUTAUTTTGGGUU |
| | TGGAGTTTGUTGTTTTAAT |
| 227 | GGUTUTGAGAGTGUTGGAAUUAAURGGARGGGGTUAGUUUUAUUATGGGAUUTGG |
| | URGATGAGTUATUTUTUTGAAGGRGTUTTUUUTTUTGTGAAGTGGGGAAGGTAAUT |
| | GTUATUUUAUAGGGRGATTGTGGGUAUURGGGAGAUUXGUTGAGGGATGUTGUAG |
| | TGTAGAAGUTTUUUAAATUTARGUTGUTTUTUTTUUTUUTUAGTUUTUTUURGUTGU |
| | TGUUUTURGGTTUATGUUUTGTGGUTGATUUATUAURGGUTUTUUARGGUUTTUAU |
| | UTTGGGRGGGTTGGATGGUTG |
| 228 | AGUUATUUAAUURGUUUAAGGTGAAGGURGTGGAGAGURGGTGATGGATUAGUUA |
| | UAGGGUATGAAURGGAGGGUAGUAGRGGGAGAGGAUTGAGGAGGAAGAGAAGUA |
| | GRGTAGATTTGGGAAGUTTUTAUAUTGUAGUATUUUTUAGXGGGTUTUURGGGTGU |
| | UUAUAATRGUUUTGTGGGATGAUAGTTAUUTTUUUUAUTTUAUAGAAGGGAAGARG |
| | UUTUAGAGAGATGAUTUATRGGUUAGGTUUUATGGTGGGGUTGAUUURGTURGGT |
| | TGGTTUUAGUAUTUTUAGAGUUU |
| 229 | GURGURGUTTTTUUAGTUTTGUUUAAUURGGTATTTUTGRGUTTGUUTUAGUUAUUR |
| | GUAGGAGRGUAGGURGUUUTTRGTUUTUURGTUUTUTGRGUUUAUAGGAUUURGG |
| | GUUURGUUUAGTURGUAGGTUURGUAGGTUUUUURGGGXGTGTUTTUUTGGUUUTG |
| | RGAUUUURGGGAUAGRGUTGAGAAUARGRGGAAGGTGGGGAGARGRGRGGRGUTG |
| | GURGGGTUUUTGGRGURGTTUTRGRGGTGUAGUUTGTGUUTGGGAGTURGGURGTU |
| | UUAUUTUAGAAUUAGAGUAAA |
| 230 | TTTGUTUTGGTTUTGAGGTGGGARGGURGGAUTUUUAGGUAUAGGUTGUAURGRGA |
| | GAARGGRGUUAGGGAUURGGUUAGRGURGRGRGTUTUUUUAUUTTURGRGTGTTUT |
| | UAGRGUTGTUURGGGGGTRGUAGGGUUAGGAAGAUAXGUURGGGGGGAUUTGRGG |
| | GAUUTGRGGAUTGGGRGGGGUURGGGGTUUTGTGGGRGUAGAGGARGGGAGGARG |
| | AAGGGRGGUUTGRGUTUUTGRGGGTGGUTGAGGUAAGRGUAGAAATAURGGGTTG |
| | GGUAAGAUTGGAAAAGRGGRGGU |
| 231 | UUTGGGAUAGGUTUAATGGAGGUTGUAGGGUUATUAGURGAUTUUTARGUAGGUT |
| | UAGTUAGUAGUUUUUTGGUUAGUUUUAUUUUTGAUTGURGGUUTUAGAAUTGGGA |
| | GUTGUTTUUTGGUAGGGUURGUUTUTGUTGGGAGAURGGAXGGTGAGTUAGUUTTA |
| | AGUURGGUAUUAGAUUUUTUTGAGGATGGAGUAUUAGUTGGUTGUUUTGAGGUTG |
| | UAAAAUTTUTTUUUTRGTGGAGAUAGGGAGGUAUUTUAGAUAUTUAUUURGGAUT |
| | UUUTTGAAUAGGGAUAGGGAGGAA |
| 232 | TTUUTUUUTGTUUTTTGTTUAAGGGAGTURGGGGTGAGTGTUTGAGGTGUUTUUUTGT |
| | UTUUARGAGGGAAGAAGTTTTGUAGUUTUAGGGUAGUUAGUTUUTGUTUUATUUTU |
| | AGAGGGGTUTGGTGURGGGUTTAAGGUTGAUTUAUXGTURGGTUTUUUAGUAGAGG |
| | RGGGUUUTGUUAGGAAGUAGUTUUUAGTTUTGAGGURGGUAGTUAGGGGTGGGGU |
| | TGGUUAGGGGGUTGUTGAUTGAGUUTGRGTAGGAGTRGGUTGATGGUUUTGUAGUU |
| | TUUATTGAGUUTGTUUUAGG |
| 233 | AUAUTGTGGGGUAGGGAGGGGUATUTUTTGAGAAUAAAAGATUUATTTUTRGAUTT |
| | TUUAAAUTGGAGAGUTTUTTGAGAGAAAAGAGAGAGAUAGGTAUAGGTUUARGUU |
| | AUUUAUAUAUAGUUUTGTGUAUAUAGAURGGAUAUAGGXGTUUAUAGGUAAGTTR |
| | GUAGUTGUTUATTTTGTGAAGTGAATGUTGATTTGGGGGURGGGTGGGGTTRGTUTG |
| | TAUATRGTGUAUTGTUAGAUUUTTUUTGAAGGATTTTTGTTAUTGAAGTATUAGAAG |
| | GUUUTTGTTUTAAGGTGGTG |
| 234 | AUUAUUTTAGAAUAAGGGUUTTUTGATAUTTUAGTAAUAAAAATUUTTUAGGAAGG |
| | GTUTGAUAGTGUARGATGTAUAGARGAAUUUUAUURGGUUUUUAAATUAGUAUUU |
| | AUTTUAUAAAATGAGUAGUTGRGAAUTTGUUTGTGGAXGUUTGTGTURGGTUTGTG |
| | TGUAUAGGGUTGTGTGTGGGTGGRGTGGAUUTGTAUUTGTUTUTUTUTTTTUTUTUA |
| | AGAAGUTUTUUAGTTTGGAAAGTRGAGAAATGGATUTTTTGTTUTUAAGAGATGUU |
| | UUTUUUTGUUUUAUAGTGTG |
| 235 | AUUUARGGGGAUAGGGGTUAGAGTAATGGAGTGGAAATGGUAGGTTUAUAATTTTG |
| | GUTAUAGUTGUTUUUATUTUTAAGUAAUUUAGGUTURGGGTTGGAGGGTGGRGAUU |
| | UUAAGATGRGGUUTUAGURGURGGUXGTGTTTGTGUTUUAGUXGATGAAGXGAGTG |
| | UAAAGGGUTGTAUAAARGRGAGGUAUTGAAUAAAUAUTGAGRGTGURGTUUAGAT |
| | GTUURGGGGGAGGUTGAGGATUUAUAURGTGGGGAGTGUTUTGUUUUUATGGAGT |
| | GAUUTGGRGTURGUUUTUUARG |
| 236 | RGTGGAGGGRGGARGUUAGGTUAUTUUATGGGGGUAGAGUAUTUUUUARGGTGTG |
| | GATUUTUAGUUTUUUURGGGAUATUTGGARGGUARGUTUAGTGTTTGTTUAGTGUU |
| | TRGRGTTTGTAUAGUUUTTTGUAUTXGUTTUATXGGUTGGAGUAUAAAUAXGGURG |
| | GRGGUTGAGGURGUATUTTGGGGTRGUUAUUUTUUAAUURGGAGUUTGGGTTGUTT |
| | AGAGATGGGAGUAGUTGTAGUUAAAATTGTGAAUUTGUUATTTUUAUTUUATTAUT |
| | UTGAUUUUTGTUUURGTGGGT |
| 237 | RGAGGTGRGGUTGUUURGRGGUTTUUTRGGUTTUURGTUURGRGTGUTTTUUTGGA |
| | GTUUUTUUTTURGGAGGUUUTUUTGUUTUUARGTGTGUUUTTUTUUATGTUUAGUA |
| | TTRGGGRGUUTUTTGTUTTTUTTUTGTTUUUTGGUTTXGGRGTUUURGGGAGTGTGA |
| | UTUURGUAGRGGGGTGUAGUTTTUUTUTGGGATGAGTGAURGGAGGGAAUURGUUT |
| | TUURGGGUARGTRGUUAGUUTUTTUUTUTTUTTUUUTAGGUTATUAAGRGGAUTTAT |
| | GAUAAGAAGGRGGTGGAT |
| 238 | ATUUAURGUUTTUTTGTUATAAGTURGUTTGATAGUUTAGGGAAGAAGAGGAAGAG |
| | GUTGGRGARGTGUURGGGAAGGRGGGTTUUUTURGGTUAUTUATUUUAGAGGAAA |
| | GUTGUAUUURGUTGRGGGAGTUAUAUTUURGGGGARGUXGAAGUUAGGGAAUAGA |
| | AGAAAGAUAAGAGGRGUURGAATGUTGGAUATGGAGAAGGGUAUARGTGGAGGUA |
| | GGAGGGUUTURGGAAGGAGGGAUTUUAGGAAAGUARGRGGGARGGGAAGURGAGG |
| | AAGURGRGGGGUAGURGUAUUTRG |
| 239 | TGUAGTGTGTAUAGGAUTUUUTGAAAGGGUTUUUTGGGATGGAGGGTTTTTTGGGGG |
| | GGUUTGTGGTTUTTUTUUAGUATGAGTUAUAAAUUAUATUUTUUAUAGTUAGURGG |
| | ATUUAAAURGATTTGAURGAGATXGGUTUTTUAATGXGGTUTUURGGGGTGTUUUR |
| | GAGGATUTGGUTGGAUTTUUAGAGTAUUTGAGUAAGAUUAGUAAGTAUUTUAURG |
| | AUTRGGAATAUAUAGGTAGAUUUTGUUUTGTGGATUUAAGGUTAGGUATUUTGTGA |
| | GUTGATAGTTAGGTGGGUTGT |
| 240 | UAGUUUAUUTAAUTATUAGUTUAUAGGATGUUTAGUUTTGGATUUAUAGGGUAGG |
| | GTUTAUUTGTGTATTURGAGTRGGTGAGGTAUTTGUTGGTUTTGUTUAGGTAUTUTG |
| | GAAGTUUAGUUAGATUUTRGGGGAUAUUURGGGAGAUXGUATTGAAGAGUXGATU |
| | TRGGTUAAATRGGTTTGGATURGGUTGAUTGTGGAGGATGTGGTTTGTGAUTUATGU |
| | TGGAGAAGAAUUAUAGGUUUUUUUAAAAGUUUTUUATUUUAGGGAGUUUTTTUAG |
| | GGAGTUUTGTAUAUAUTGUAU |
| 241 | AGGAGUUTGTGAUUUAGAAATGGTAAGTAAGGTURGATTUTUAUUAAUAAAGUAG |
| | GUATGAUUTUAGAUAAGTUUUTAUUUTGUTUTGGGUUTUAGTTTUTUUTTTAGTGA |
| | GGAGGTGGGTGAGGGTUUTGTUUTUUTURGGGAAUTGGXGATTTGGGAAGGUAGAG |
| | AUATTUUUAGAATUXGURGGAGTUUTGAAAAUAUUUARGUUUTTTGTUUUAGUAAT |
| | UUTGAGAAAGGUUAUAUTGATAAAGUTGTGGGTGGUUAGATGAUAGUATTUTTGGG |
| | UUTUAGARGAAGTGGGAGGGG |
| 242 | UUUTUUUAUTTRGTUTGAGGUUUAAGAATGUTGTUATUTGGUUAUUUAUAGUTTTA |
| | TUAGTGTGGUUTTTUTUAGGATTGUTGGGAUAAAGGGRGTGGGTGTTTTUAGGAUTU |
| | RGGXGGATTUTGGGAATGTUTUTGUUTTUUUAAATXGUUAGTTUURGGAGGAGGAU |
| | AGGAUUUTUAUUUAUUTUUTUAUTAAAGGAGAAAUTGAGGUUUAGAGUAGGGTAG |
| | GGAUTTGTUTGAGGTUATGUUTGUTTTGTTGGTGAGAATRGGAUUTTAUTTAUUATT |
| | TUTGGGTUAUAGGUTUUTT |
| 243 | AGUUUTGGUTGAGTGUUUUUUAUTTUUUTGGUTRGAGTTUUUTUAUGAAAAAAUUT |
| | GGTGAUTUUTUUTGUAUAGAAUAAAGGUTGAGTGAGGUAUAGTGUUUAGGGGATG |
| | AGGAAGGUTGAGUURGGGAUUAGGUAGGAGGAAUUTGUXGTGUAUTUAUTUAGAU |
| | TUUTGUAGUAUURGGGGUAGGTGUTUUAUUAGRGGGUAUAGURGUTUAGURGUUT |
| | UUTUATUURGURGUAGUUAGTGGATUAUUAUAGUTGTUAGAGAGGUUUAUUAUTT |
| | GGUUAURGGGTUTARGUUTGUAGA |
| 244 | TUTGUAGGRGTAGAUURGGTGGUUAAGTGGTGGGUUTUTUTGAUAGUTGTGGTGAT |
| | UUAUTGGUTGRGGRGGGATGAGGAGGRGGUTGAGRGGUTGTGUURGUTGGTGGAG |
| | UAUUTGUUURGGGTGUTGUAGGAGTUTGAGTGAGTGUAXGGUAGGTTUUTUUTGUU |
| | TGGTUURGGGUTUAGUUTTUUTUATUUUUTGGGUAUTGTGUUTUAUTUAGUUTTTG |
| | TTUTGTGUAGGAGGAGTUAUUAUUTTTTTTUUTUAGGGAAUTRGAGUUAGGGAAGT |
| | GGGGGGUAUTUAGUUAGGGUT |
| 245 | UTUTGGGUTUTUTUUAUAGGGTTGAGGUUAGAGUTATTUTUAGAATUURGURGGAG |
| | GGGUUTTGUUTGGAGGAGGGUAUAARGAUAUTTAUTTGTUUUUATUAGUUGAUTG |
| | AGGGUTGGGGTTGGGUTGGGTUAUAUAGTTUAGTGUTXGUTUTAAGAGATGTTUUR |
| | GGAATAGUTGAGTUAUUTGGGUUAGGGGGTUUAUTGTGGAGAGGAGGAGGTGAGT |
| | GGGGTGGGGAGUAGGGUUUUAUUUTUUTUTUUAAGUTAAGGGUTTTTTUUTGGGTG |
| | GGUTGGGGUUAUAUUTAGGGUU |
| 246 | GUUUTAGGTGTGGUUUUAGUUUAUUUAGGAAAAAGUUUTTAGUTTGGAGAGGAGG |
| | GTGGGGUUUTGUTUUUUAUUUUAUTUAUUTUUTUUTUTUUAUAGTGGAUUUUUTG |
| | GUUUAGGTGAUTUAGUTATTURGGGAAUATUTUTTAGAGXGAGUAUTGAAUTGTGT |
| | GAUUUAGUUUAAUUUUAGUUUTGGGTUAGUTGATGGGGAUAAGTAAGTGTRGTTG |
| | TGUUUTUUTUUAGGUAAGGUUUTURGGRGGGATTUTGAGAATAGUTUTGGUUTUA |
| | AUUUTGTGGAGAGAGUUUAGAGU |
| 247 | RGUUUTGGUTUTGGGUTTTUAUUAURGUUTGGGGUUUTGUTTGGAUTUTGUAGUTG |
| | TGTUUUAAGGUTGRGUUUTAGATTTGTUTAUTUUTTUUUUTGUUUUUTUUUTGUTTT |
| | UTUURGGUUTUTGTAGTUTTUUTGUTUUTUUAUUTAXGTGGUTGUUTTGGGUUUUA |
| | TGUAGUTUUTUUUURGGGATGUUUUATGUTUTGTTUTGTGAUTGUUTTAUTUTTGAT |
| | UAUUTUTGATGGUTGUTUUAGTGUAGGUAGAAUUUUUAAAGTUUTUTGTTUTUTAU |
| | ATGTUUUUUTTTGUUAUU |
| 248 | GGTGGUAAAGGGGGAUATGTAGAGAAUAGAGGAUTTTGGGGGTTUTGUUTGUAUTG |
| | GAGUAGUUATUAGAGGTGATUAAGAGTAAGGUAGTUAUAGAAUAGAGUATGGGGU |
| | ATUURGGGGGAGGAGUTGUATGGGGUUUAAGGUAGUUAXGTAGGTGGAGGAGUAG |
| | GAAGAUTAUAGAGGURGGGAGAAAGUAGGGAGGGGGUAGGGGAAGGAGTAGAUA |
| | AATUTAGGGRGUAGUUTTGGGAUAUAGUTGUAGAGTUUAAGUAGGGUUUUAGGRG |
| | GTGGTGAAAGUUUAGAGUUAGGGRG |
| 249 | TTTUUTUUTUTUTTTUUTTUUTTUTUUAGTTUUTUUUTTTTUUTUUTTUAUTGTTTGA |
| | TTTTTAGUUUTUTGATTTTTTUTTUUTUTTUTUUAUTUTTTATTTUTTTTUATUUTUT |
| | UURGGTUUTTTTTTUTGUTTTGTUAUUTUUTTXGTTTTUTTUTUTUTUTGGUTGAUTU |
| | AGGGGAURGGAGGTGGGUUTATUTGGAGTGAGTGAGTAAGTGTGTTGGGAGGTGAG |
| | GGTGGAGGGUTGGAGGGGGGUAGTGATUTGGUUTGAGUUUUTUUAGTATTGUTUUA |
| | GUUUUAGURGUAG |
| 250 | UTGRGGUTGGGGUTGGAGUAATAUTGGAGGGGUTUAGGUUAGATUAUTGUUUUUU |
| | TUUAGUUUTUUAUUUTUAUUTUUUAAUAUAUTTAUTUAUTUAUTUUAGATAGGUU |
| | UAUUTURGGTUUUUTGAGTUAGUUAGAGAGAGAAGAAAAXGAAGGAGGTGAUAAA |
| | GUAGAAAAAAGGAURGGGAGGAGGATGAAAAGAAATAAAGAGTGGAGAAGAGGA |
| | AGAAAAAATUAGAGGGUTAAAAATUAAAUAGTGAAGGAGGAAAAGGGAGGAAUTG |
| | GAGAAGGAAGGAAAGAGAGGAGGAAA |
| 251 | UTATAUTUTUAGGUUUAGGUUAGGGGRGGUAGUTGUUUUUUTUAUTGUUUUARGU |
| | AUAAATUUUTGGTTTUAGTUUAAAURGUTAUTGTGAGUTUUAGATUTGGGTGGGGU |
| | URGGAGUUTUUTUATTAGUAUUAGGTGGGATGGUUTTGXGAAGATAAAGUTUTGTU |
| | TGGUUUUAGUUUAGGUTGTAGUUURGGGUUUTGUUUUAGGUAGUUTGUUUAGGAT |
| | GUTGTGUUAGTTTUTGAUUTTTGUUUAUTGUAGUUAGATGGGGUUATUTGTGGAGU |
| | TGGUUTTTTUTUUTTAGAATGA |
| 252 | TUATTUTAAGGAGAAAAGGUUAGUTUUAUAGATGGUUUUATUTGGUTGUAGTGGG |
| | UAAAGGTUAGAAAUTGGUAUAGUATUUTGGGUAGGUTGUUTGGGGUAGGGUURGG |
| | GGUTAUAGUUTGGGUTGGGGUUAGAUAGAGUTTTATUTTXGUAAGGUUATUUUAU |
| | UTGGTGUTAATGAGGAGGUTURGGGUUUUAUUUAGATUTGGAGUTUAUAGTAGRG |
| | GTTTGGAUTGAAAUUAGGGATTTGTGRGTGGGGUAGTGAGGGGGGUAGUTGURGUU |
| | UUTGGUUTGGGUUTGAGAGTATAG |
| 253 | ARGGGTGTUTGUTUUUAAGUTGGGUAUUUUTUUUUUAGGUTGTGGGAAURGUTGG |
| | GUUATTUTGAUUTRGAAUUAGAAATAGUUURGAUUUUUUTUTTTUTUUURGRGUUU |
| | UUAGURGGAURGUUUUURGGGAUUUUAGUUAAAUUAUAGXGTURGGUATAGGGU |
| | UTUTUUUTTATTGUAUAAURGUTAGGGGAGAUAGAGAGGATGGGGGTUURGGGAA |
| | UATGUTGGGGTRGUUAGAUTATGGGARGTAGGGGRGTAGUTUAUUTGTTGGAGAUA |
| | GGUURGUTUUTUAUTGGUTGAGTU |
| 254 | GAUTUAGUUAGTGAGGAGRGGGUUTGTUTUUAAUAGGTGAGUTARGUUUUTARGT |
| | UUUATAGTUTGGRGAUUUUAGUATGTTUURGGGAUUUUUATUUTUTUTGTUTUUUU |
| | TAGRGGTTGTGUAATAAGGGAGAGGUUUTATGURGGAXGUTGTGGTTTGGUTGGGG |
| | TUURGGGGGGRGGTURGGUTGGGGGRGRGGGGAGAAAGAGGGGGGTRGGGGUTAT |
| | TTUTGGTTRGAGGTUAGAATGGUUUAGRGGTTUUUAUAGUUTGGGGGAGGGGTGUU |
| | UAGUTTGGGAGUAGAUAUURGT |
| 255 | GUAGTAAAUAGTUUTATTGTAUAAATATATAGRGRGGGUTGGGRGGGGGRGGTUAA |
| | UUURGGTTUUUTGGUARGGGGAUAGGGRGRGUTGGGUURGGUTUTGUAGRGAGUR |
| | GGTGGGAGGGUUTAGUTGTGGUUUAGGRGGTGTTGAGUAXGGGURGGGGGRGTUA |
| | TAGURGGGGAGGGURGGGUAGRGAGRGGGTGGGRGAGGGGRGAGTUATRGTUTGU |
| | UURGUURGGAGGGGAUUURGGRGGGTGAGGGARGTGGGTGGAGGGAGARGTGGGG |
| | AGUTUAGTRGGAGTAGATGATGAA |
| 256 | TTUATUATUTAITTURGAUTGAGUTUUUUARGTUTUUUTUUAUUUARGTUUUTUAUU |
| | RGURGGGGTUUUUTURGGGRGGGGUAGARGATGAUTRGUUUUTRGUUUAUURGUT |
| | RGUTGUURGGUUUTUUURGGUTATGARGUUUURGGUUXGTGUTUAAUAURGUUTG |
| | GGUUAUAGUTAGGUUUTUUUAURGGUTRGUTGUAGAGURGGGUUUAGRGRGUUUT |
| | GTUUURGTGUUAGGGAAURGGGGTTGAURGUUUURGUUUAGUURGRGUTATATATT |
| | TGTAUAATAGGAUTGTTTAUTGU |
| 257 | AGTTATTTAATAUATGGUUUUAGTGGUAUTAALUTGTUAUTAAGUUTUATGTTUTU |
| | UATUUATAAAATGGAGAUUAUAATUATAUUTGUTGUAAAATUUAAAATTUAGAGGT |
| | TTUTAUAGRGTGAURGAUAUTGTGUUURGGAGAGTTTXGGUUUTUTUUTGGUTUTG |
| | GUUUUUTGGAAUARGTGATGUUUAGUUUAAAUAGTGUUAUAUUUTGUTUTAUAAT |
| | GUUTUAARGAGAGTUAUAAUUAAAGATTTTTGAGTUAGAGGAUAATAGAGGAGGT |
| | GGGAAUTGGGTAAAXGGAGAGT |
| 258 | UTUTUXGTTTAUUUAGTTUUUAUUTUUTUTATTGTUUTUTGAUTUAAAAATUTTTGG |
| | TTGTGAUTUTRGTTGAGGUATTGTAGAGUAGGGTGTGGUAUTGTTTGGGUTGGGUAT |
| | UARGTGTTUUAGGGGGUUAGAGUUAGGAGAGGGUXGAAAUTUTURGGGGUAUAGT |
| | GTRGGTUARGUTGTAGAAAUUTUTGAATTTTGGATTTTGUAGUAGGTATGATTGTGG |
| | TUTUUATTTTATGGATGGAGAAUATGAGGUTTAGTGAUAGGTTAGTGUUAUTGGGG |
| | UUATGTATTAAATAAUTG |
| 259 | GAGTTTXGGUUUTUTUUTGGUTUTGGUUUUUTGGAAUARGTGATGUUUAGUUUAAA |
| | UAGTGUUAUAUUUTGUTUTAUAATGUUTUAARGAGAGTUAUAAUUAAAGATTTTTG |
| | AGTUAGAGGAUAATAGAGGAGGTGGGAAUTGGGTAAAXGGAGAGTUUATGGUUTT |
| | TGGAGGTGGGGUAUAGUURGGAGTGAATGAGGGUUUAGAGTTTUUAGAGAAURGA |
| | ATATAGATUTGTGTGTGAAGUUTUUAGATATTUTAATGTTGAUAARGAAATUAAATT |
| | GAAAAAAAATAAAAATUAATA |
| 260 | ATTGATTTTTATTTTTTTTUAATTTGATTTRGTTGTUAAUATTAGAATATUTGGAGGUT |
| | TUAUAUAUAGATUTATATTRGGTTUTUTGGAAAUTUTGGGUUUTUATTUAUTURGG |
| | GUTGTGUUUUAUUTUUAAAGGUUATGGAUTUTUXGTTTAUUUAGTTUUUAUUTUUT |
| | UTATTGTUUTUTGAUTUAAAAATUTTTGGTTGTGAUTUTRGTTGAGGUATTGTAGAG |
| | UAGGGTGTGGUAUTGTTTGGGUTGGGUATUARGTGTTUUAGGGGGUUAGAGUUAGG |
| | AGAGGGUXGAAAUTUT |
| 261 | RGGGTGRGGAUURGUUAUUTGURGUAUUUTTUUUTTUUUAAUUUTGUUUTTTUUUU |
| | AUUUUUAUUUUAUTTUUUAUUUUUAAUUUURGUTRGGRGUUUUAUTUURGAUUUT |
| | GUUTGUURGGGUAUUTRGGGGRGTURGUTRGURGGUTTXGUUTUUAUTTGUUURGG |
| | UAGGRGRGRGTGGGUTRGGRGTUURGRGUTUUUTUUTRGAUTGTGRGGUTUURGRG |
| | UTGURGGGTTTUUTGTTUAAUAATATAAUUAGGGAGGUAURGGRGGAGAGRGURGG |
| | GUAGAAUTTUUTUURGGAUTG |
| 262 | UAGTURGGGAGGAAGTTUTGUURGGRGUTUTURGURGGTGUUTUUUTGGTTATATT |
| | GTTGAAUAGGAAAUURGGUAGRGRGGGAGURGUAUAGTRGAGGAGGGAGRGRGGG |
| | ARGURGAGUUUARGRGRGUUTGURGGGGUAAGTGGAGGXGAAGURGGRGAGRGGA |
| | RGUUURGAGGTGUURGGGUAGGUAGGGTRGGGAGTGGGGRGURGAGRGGGGGTTG |
| | GGGGTGGGAAGTGGGGTGGGGGTGGGGAAAGGGUAGGGTTGGGAAGGGAAGGGTG |
| | RGGUAGGTGGRGGGTURGUAUURG |
| 263 | GGUAAGGUAGTUTGGGRGURGTUTURGGTUTRGGGGUUTGRGGTRGGGGUAURGRG |
| | GTGURGRGTTTGAGURGGTUAGUTUUUTGRGGAAATTAUAGGGGRGUTRGGRGUTG |
| | RGGTRGRGUUUUURGGGGUAGRGUURGUTGGTTGGAGGXGTTTAAATTGAAAGUAG |
| | UTTTGGGGAGAGGGGGRGGARGRGGGURGURGAGUAAGGGGAGGGGGRGGUURGG |
| | UAUAGRGAUUUUATTGTUTGTGUURGURGAGGGGTGGAAUUTTGRGGTGAGUTRGG |
| | RGRGGRGUUUUUTUUURGAGU |
| 264 | GUTRGGGGAGGGGGRGURGRGURGAGUTUAURGUAAGGTTUUAUUUUTRGGRGGG |
| | UAUAGAUAATGGGGTRGUTGTGURGGGURGUUUUUTUUUUTTGUTRGGRGGUURGR |
| | GTURGUUUUUTUTUUUUAAAGUTGUTTTUAATTTAAAXGUUTUUAAUUAGRGGGRG |
| | UTGUUURGGGGGGRGRGAURGUAGRGURGAGRGUUUUTGTAATTTURGUAGGGAG |
| | UTGAURGGUTUAAARGRGGUAURGRGGTGUUURGAURGUAGGUUURGAGAURGGA |
| | GARGGRGUUUAGAUTGUUTTGUU |
| 265 | GGAGGGAGUUTGUAUTUTGGGUAGTGATGTGGAGTUAGAGATTTUUAAGTTUATGG |
| | TGUAAGTUTGTGGGAGAGUAGAAUTUAUTTTAUAAAATTGTTGAUAGURGGTGTTG |
| | TTAGAGARGGAAAGGGAUAAUUURGGUTUUTUTUUAGGXGTGGAGTUTGTGGGGAT |
| | GTGUTTUUAGAAAATGUAGGGTTAAGUAGGAGUTGUAGAGTAGAATUAAATGAUA |
| | ATGAUTUAUTGUTGTUAUTAAUAGGUTUTTTGTGGGGGUTGTAGGTGGGAGGRGAT |
| | ATGGURGGUAUUTTRGUAUAA |
| 266 | TTGTGRGAAGGTGURGGUUATATRGUUTUUUAUUTAUAGUUUUUAUAAAGAGUUT |
| | GTTAGTGAUAGUAGTGAGTUATTGTUATTTGATTUTAUTUTGUAGUTUUTGUTTAAU |
| | UUTGUATTTTUTGGAAGUAUATUUUUAUAGAUTUUAXGUUTGGAGAGGAGURGGG |
| | GTTGTUUUTTTURGTUTUTAAUAAUAURGGUTGTUAAUAATTTTGTAAAGTGAGTTU |
| | TGUTUTUUUAUAGAUTTGUAUUATGAAUTTGGAAATUTUTGAUTUUAUATUAUTGU |
| | UUAGAGTGUAGGUTUUUTUU |
| 267 | GTTUTGGTTRGGUAGAGTGGRGGUAATUTTGUUTUTUTUTUTAGAAUAUUTAAAGA |
| | AGUUAGTGAGTGAGUTGUTUATGUAUAURGGGGAGAUUTAUAGARGGATUUAGGA |
| | GGAGRGGGAGUTUATTGAUTGUAUAUTTUUAAUURGGXGTGATAGGAAAGTGAGG |
| | UUAUUTGTUUTAAGTGUURGGGGGUAGGGGGGTUUATGGAGGAGGGGGRGGGGGU |
| | AGGTGTUTGGAUAUAGGGATGUTGGTUTUAGGTGGUAUAGUTGGGGAGAAAAAAU |
| | UTATUUATTGUAAAAUATUATTAG |
| 268 | TAATGATGTTTTGUAATGGATAGGTTTTTTUTUUUUAGUTGTGUUAUUTGAGAUUAG |
| | UATUUUTGTGTUUAGAUAUUTGUUUURGUUUUUTUUTUUATGGAUUUUUUTGUUU |
| | URGGGUAUTTAGGAUAGGTGGUUTUAUTTTUUTATUAXGURGGGTTGGAAGTGTGU |
| | AGTUAATGAGUTUURGUTUUTUUTGGATURGTUTGTAGGTUTUUURGGTGTGUATG |
| | AGUAGUTUAUTUAUTGGUTTUTTTAGGTGTTUTAGAGAGAGAGGUAAGATTGURGU |
| | UAUTUTGURGAAUUAGAAUA |
| 269 | RGTGATUAGAGAUAGAAATUAGUTUUUUTUUTUUUTUAUTGAGUTTGTAGUUAUTT |
| | TAAGTATAAUUTGTGTUUTGTGUUAGTTUUAUUATAAATUAGUUUTGAGTTTTTATUR |
| | GGRGGUTTATTUTGUTGUUAAAAUUTTUAUAGTTGXGGGAATGGGUUAGGGAGAG |
| | AGUURGGAUTTTAUTURGGUTGTGGTGAUTUARGUUTTTGGGAAGGGUTGAGGTAT |
| | TTGTUUTTGGATGTGGGGATGUTGTGGUUTUTGGTTGGGAAUAUAGUUTRGTTTTGT |
| | UTGUTGGUTUTGGUTTUU |
| 270 | GGAAGUUAGAGUUAGUAGAUAAAARGAGGUTGTGTTUUUAAUUAGAGGUUAUAGU |
| | ATUUUUAUATUUAAGGAUAAATAUUTUAGUUUTTUUUAAAGGRGTGAGTUAUUAU |
| | AGURGGAGTAAAGTURGGGUTUTUTUUUTGGUUUATTUUXGUAAUTAATGAAGGTT |
| | TTGGUAGUAGAATAAGURGURGGATAGAAUTUAGGGUTGATTTATGGTGGAAUTGG |
| | UAUAGGAUAUAGGTTATAUTTAAAGTGGUTAUAAGUTUAGTGAGGGAGGAGGGGA |
| | GUTGATTTUTGTUTUTGATUARG |
| 271 | UAGTATGUATGTGTUUATTTAAGGUATUTGAGUUUTGGUUTTTGUTGTTUTTUUTTU |
| | UTTUTTimURGTRGGGTTGUTGAGUTUAAUATUUUAURGGGUTUUTGUTUUTTAGU |
| | TAGUAGTUAGTGUAGAGUTGUTGGGTUUTTUUGUUTXGUTTGGGUAGGUTTUTGTU |
| | AATGAGTUAUUAAGUAURGGGAAATAAGTGUAUAGGAAGGAGUAGGTGGUAAGAU |
| | UUTGTGGAGGTAGAGAUAGTTUUATTUAGTGAGTGAGUTGTGAUTGUAAATTTGGG |
| | AAGGTTUTGGGGGAAGUAA |
| 272 | TTGUTTUUUUUAGAAUUTTUUUAAATTTGUAGTUAUAGUTUAUTUAUTGAATGGAA |
| | UTGTUTUTAUUTUUAUAGGGTUTTGUUAUUTGUTUUUUUTGTGUAUTTATTTUURG |
| | GTGUTTGGTGAUTUATTGAUAGAAGUUTGUUUAAGXGAGGUAGAAGGAUUUAGUA |
| | GUTUTGUAUTGAUTGUTAGUTAAGGAGUAGGAGUURGGTGGGATGTTGAGUTUAGU |
| | AAUURGARGGAGAAAGAAGGAAGGAAGAAUAGUAAAGGUUAGGGUTUAGATGUU |
| | TTAAATGGAUAUATGUATAUTG |
| 273 | RGGURGRGGGGGGRGUUTGGAGGAGGGAAGUUTUTURGGAGGAGAAGAGUTGGGR |
| | GGURGURGTAGGAGGAAGRGGAAAGATAAGGGGUUUTRGGUTRGGRGGGGURGUR |
| | GGARGUUUAGGAGUUTUAATGGGGAUARGTRGGGTGGGGAXGGAGGUAGUTUUTG |
| | TURGGAUAGRGAAAUURGRGAGGUUUAGGAGAGRGGUAGUUAGRGRGGUAUAGUU |
| | RGGGAGUTGRGGUUUARGURGGAGUUTARGGAUATGGGUTRGGAAGGGAUAAAAA |
| | URGGGURGGAGTUAGRGUTGGAGUU |
| 274 | GGUTUUAGRGUTGAUTURGGUURGGTTTTTGTUUUTTURGAGUUUATGTURGTAGG |
| | UTURGGRGTGGGURGUAGUTUURGGGUTGTGURGRGUTGGUTGURGUTUTUUTGGG |
| | UUTRGRGGGTTTRGUTGTURGGAUAGGAGUTGUUTUXGTUUUUAUURGARGTGTUU |
| | UUATTGAGGUTUUTGGGRGTURGGRGGUUURGURGAGURGAGGGUUUUTTATUTTT |
| | URGUTTUUTUUTARGGRGGURGUUUAGUTUTTUTUUTURGGAGAGGUTTUUUTUUT |
| | UUAGGRGUUUUURGRGGURG |
| 275 | GUATUAUAUATUUUTUUUTGTUTUUUTGUTGUUAAUUAGTTUUAUUAUTGTUUAUU |
| | TUTGUUUUAATTUUAUUTUUUARGUUTGUTGUTGUAUUTTGGAUTTGTTTTUUTGAA |
| | ATTGUATGUUATUUAUTUTUUUTTUTAUTTUTGUTGXGTUUUTUTTGUUUTATUAGG |
| | AUUTGTGGAUTUAGGAUTUURGGGUTTTUTUUUUUATUTUTUTTUUURGTTGGGUU |
| | TUAUTAUUATTTUAGUUAUTTTUUTGGUAGUTTUAUTUUTGUUUUAAGAUUUUAGU |
| | UTTTUAUUUTUUTGGTTUT |
| 276 | AGAAUUAGGAGGGTGGAGGUTGGGGTUTTGGGGUAGGAGTGAAGUTGUUAGGAAA |
| | GTGGUTGAAATGGTAGTGAGGUUUAARGGGGAAGAGAGATGGGGGAGAAAGUURG |
| | GGAGTUUTGAGTUUAUAGGTUUTGATAGGGUAAGAGGGAXGUAGUAGAAGTAGAA |
| | GGGAGAGTGGATGGUATGUAATTTUAGGAAAAUAAGTUUAAGGTGUAGUAGUAGG |
| | RGTGGGAGGTGGAATTGGGGUAGAGGTGUAUAGTGGTGGAAUTGGTTGGUAGUAG |
| | GGAGAUAGGGAGGGATGTGTGATGU |
| 277 | GGTGGRGATGUTUTAGUUAUUTGUTTUTUTGTUUTUTTTUAUAUAAATGTATUUTGU |
| | TTUTTTUUAGATGTURGGUTTAATGGGAUTGGATTTATUTTUAAAAGTUUTGGTTTG |
| | UUTUTGATTGAAAAUUAGTGTGUTUUUUATGGTTAXGGARGGUTGTGUAGGTTTTTG |
| | TTTTGTTGAAGGGAATTGGUTUAUTUTGAGTUAGURGTGUAUURGGGUTGUTGATGT |
| | AGTUTUAGTGTGATGGTTAAAUTTTAAGTGTUAATTTGAUTGGGUTAAGGAATGUUA |
| | GAUATTATTTURGGG |
| 278 | UURGGAAATAATGTUTGGUATTUUTTAGUUUAGTUAAATTGAUAUTTAAAGTTTAA |
| | UUATUAUAUTGAGAUTAUATUAGUAGUURGGGTGUARGGUTGAUTUAGAGTGAGU |
| | UAATTUUUTTUAAUAAAAUAAAAAUUTGUAUAGURGTUXGTAAUUATGGGGAGUA |
| | UAUTGGTTTTUAATUAGAGGUAAAUUAGGAUTTTTGAAGATAAATUUAGTUUUATT |
| | AAGURGGAUATUTGGAAAGAAGUAGGATAUATTTGTGTGAAAGAGGAUAGAGAAG |
| | UAGGTGGUTAGAGUATRGUUAUU |
| 279 | GGTTTTGGGTGTGGAUATUUUTGGAGGGUTGTTTTAGTGUUUAUAUUAATGUUUTAG |
| | TTAAAGAAUUAUUUTGTUUUUTTAGUUTTUTGUAGGAUAGGTGGGAAAGGGURGG |
| | GTGTUTGGTUUTGUTGUUAGGGGAUAGTGUAGGTGTGAUXGTURGGGUAGAGATGA |
| | GTUAUUUTUUAUAUTGTUTTGUTGUURGTUTUUARGUUTAGTTTTAGUTRGTGTGGT |
| | UAAGAAGGGGRGATTUUTUAUUTAGAAUAUATGGGTUAUAAATGUTAUUTTTGAAA |
| | ATGGAAAUAAAAATAAUUUA |
| 280 | TGGGTTATTTTTGTTTUUATTTTUAAAGGTAGUAUUAAATGGATTGGTGTGAUUU |
| | AGGAATRGUUUUTTUTTGAUUAUARGAGUTAAAAUTAGGRGTGGAGARGGGUAGU |
| | AAGAUAGTGTGGAGGGTGAUTUATUTUTGUURGGAXGGTUAUAUUTGUAUTGTUUU |
| | UTGGUAGUAGGAUUAGAUAUURGGUUUTTTUUUAUUTGTUUTGUAGAAGGUTAAG |
| | GGGAUAGGGTGGTTUTTTAAUTAGGGUATTGGTGTGGGUAUTAAAAUAGUUUTUUA |
| | GGATGTUUAUAUUUAAAAUU |
| 281 | UAGAAUUTGAGRGATGAAGTGARGGGATTTAGTUAGGUUTATGAAGAGTUAATGGU |
| | AUTTGUUTUUUATAATUUTTUUAGTUUUATTGGUUAAUURGTUTGTUUUTRGRGTG |
| | ATUTTTTGGATUTGAAGTGGTGTTTUAGGAUURGGAGXGTGGUUTGUAUTGUUTTG |
| | TTUTGTTTGTTTGTGUAURGGATTUATRGTGAUTUATUUTGAGTUATUUAGGUAGTA |
| | TGGAAGAAUTTTGGAGTTATTTTAAAUUUTTTGGUTUAGAAUUUUATTTGGAGGAT |
| | ATTAAUATGUAAGATAA |
| 282 | TTATUTTGUATGTTAATTUTAGAAGAAATGGGGTTUTGAGUUAAAGGGTTTAAAATA |
| | AUTUUAAAGTTUTTUUATAUTGUUTGGATGAUTUAGGATGAGTUARGATGAATURG |
| | GTGUAUAAAUAAAUAGAAUAAGGUAGTGUAGGUUAXGUTURGGGTUUTGAAAUAU |
| | UAUTTUAGATUUAAAAAGATUARGRGAGGGAUAGARGGGTTGGUUAATGGGAUTG |
| | GAAGGATTATGGGAGGUAAGTGUUATTGAUTUTTUATAGGUUTGAUTAAATUURGT |
| | UAUTTUATRGUTUAGGTTUTG |
| 283 | GTUUUTTGGUAUUAGGAUATUAUUUTUUUAUUTUTUUUAGAUUUTTUTUUTTGAUU |
| | TUTTTAGAGUAGUUATUUTTGGAGTTGUTUAARGUUUTGRXXRGGAAGGTTGAAUR |
| | UUAUAGUTTGGUTUATUTAUTTURGGGTTAGUTUAAXGUUUTUTTUTTTTUUUG |
| | TGAAUUAUAGUTTGGUTUATUTAUTURGGGTTAGUTUAARGUAUTUTTUTUTUTU |
| | UUTUTGAAUUARGGUTTGGUTUATUTAUTTUTGGGTTAATTTAGGUTTTUTUUAUAG |
| | ATAGTUTGAAAAGGGA |
| 284 | TUUUTTTTUAGAUTATUTGTGGAGAAAGUUTAAATTAAUUUAGAAGTAGATGAGUU |
| | AAGURGTGGTTUAGAGGGAGAAGAGAAGAGTGRGTTGAGUTAAUURGGAAGTAGA |
| | TGAGUUAAGUTGTGGTTUAGAGGGAGAAAAGAAGAGGGXGTTGAGUTAAUURGGA |
| | AGTAGATGAGUUAAGUTGTGGTTUAGAGGGAGAAGAGAAGAGGGRGTTGAGUAAU |
| | TUUAAGGATGGUTGUTUTAAAGAGGTUAAGGAGAAGGGTUTGGGAGAGGTGGGAG |
| | GGTGATGTUUTGGTGUUAAGGGAU |
| 285 | UTGAGTUAAUAAGGUTGAUAAGGUTGTGTTUTGGATGUAGGUURGGUAGATGTTTG |
| | AGGGGGAGGTGGUUAGUUTGGAGGUUUTUAGGAGUARGGGUUTGGTGRGGGTGUR |
| | GAGGUUUATGAAGGTUATRGAUUTGURGGGAGGTGGGGUXGUUTTTGTGATGGAGU |
| | ATTTGAAGATGAAGAGUTTGAGUAGGTGAGTGTGTGTGAGAUUUATATGRGUAUAT |
| | GTGTAUAGGUAGAGAGAGAUTUAGAGAUAAAUAGAGAGAGAUAGAGAAAGGGAT |
| | AGAGATGGGGAGGGAGAUAGAAA |
| 286 | TTTUTGTUTUUUTUUUUATUTUTATUUUTTTUTUTGTUTUTUTUTGTTTGTUTUTGAG |
| | TUTUTUTUTGUUTGTAUAUATGTGRGUATATGGGTUTUAUAUAUAUTUAUUTGUTU |
| | AAGUTUTTUATUTTUAAATGUTUUATUAUAAAGGXGGUUUUAUUTUURGGUAGGTR |
| | GATGAUUTTUATGGGUUTRGGUAUURGUAUUAGGUURGTGUTUUTGAGGGUUTUU |
| | AGGUTGGUUAUUTUUUUUTUAAAUATUTGURGGGUUTGUATUUAGAAUAUAGUUT |
| | TGTUAGUUTTGTTGAUTUAG |
| 287 | TTRGTGUAUTUTGRGGURGRGGRGGUAGUAGURGRGGRGGRGGUUAGUTUUURGGT |
| | UTARGTGUUUAUUAUURGRGTGGGTTUUATGUTGUURGGUUTAURGTAUUAUUTGU |
| | AGGGGTRGGGUAGTGGGUUAGUUAAUUARGRGGGRGGXGRGGGRGRGUAUUURGG |
| | UTGGUUTUAGGUUTRGGURGAUAGUUUTUUATARGGUAGRGGAGGRGGRGRGGUT |
| | GGRGGRGGGGURGRGGGGUUTGGRGGRGUTGGUTUAGURGRGGRGUARGTUTRGGR |
| | GRGUTTUUUUTAUTUTUUUAGU |
| 288 | GUTGGGAGAGTAGGGGAAGRGRGURGAGARGTGRGURGRGGUTGAGUUAGRGURG |
| | UUAGGUUURGRGGUUURGURGUUAGURGRGURGUUTURGUTGURGTATGGAGGGU |
| | TGTRGGURGAGGUUTGAGGUUAGURGGGGTGRGRGUURGXGURGUURGRGTGGTTG |
| | GUTGGUUUAUTGUURGAUUUUTGUAGGTGGTARGGTAGGURGGGUAGUATGGAAU |
| | UUARGRGGGTGGTGGGUARGTAGAURGGGGAGUTGGURGURGURGRGGUTGUTGU |
| | RGURGRGGURGUAGAGTGUARGAA |
| 289 | TUTTTGTGTGAGTUATGTUTTATATUUAAUAAGTAUTUAAAAAAAGATTTTTTTTTTT |
| | TTTTTTTAAGATGGAGTGTRGUTUTGTUAUUUAGGUTGGAGTGUAGTGGUATGATUT |
| | TGGUTUAUTGUAAUUUTGUUTUURGGGTTUAAGXGATTUTTUTGUUTUAGGUTUU |
| | TGAGTAGUTGGAATTAUAGGUATGUUUUAUUAUAUURGGUTAATTTTTATATGTAA |
| | TAGAAAUAAGGTTTUAUUATGTTGGUUAGAUAGGTUTTGAAUTUUTGAUUTUAGGT |
| | GATUUAUUUAUUTRGGU |
| 290 | GURGAGGTGGGTGGATUAUUTGAGGTUAGGAGTTUAAGAUUTGTUTGGUUAAUATG |
| | GTGAAAUUTTGTTTUTATTAUATATAAAAATTAGURGGGTGTGGTGGGGUATGUUTG |
| | TAATTUUAGUTAUTUAGGAGUUTGAGGUAGAAGAATXGUTTGAAUURGGGAGGUA |
| | GAGGTTGUAGTGAGUUAAGATUATGUUAUTGUAUTUUAGUUTGGGTGAUAGAGRG |
| | AUAUTUUATUTTAAAAAAAAAAAAAAAAAATUTTTTTTTGAGTAUTTGTTGGATATA |
| | AGAUATGAUTUAUAUAAAGA |
| 291 | AUUAUUUUUTGAUUUUTUATGAUTUAUUUAGUTUUTAAGTGUUUUTGGGUAUUUA |
| | GTTUTTTGTGGUATGGGURGGTGUAAGTTTUTATATGAGAGUUAGAGAGAUAGGGA |
| | GGGAGGUURGGGUTUUTGGUUTTTTGGGAAAAGATGUUXGTUTUAGAUUAGUAAA |
| | AGGAGGUAGUTGUTTTAGGAGUURGGGAAAATGUUATUAUTGATAGTATTATTATT |
| | ATTTTUUUATTTTUUUTTTGTGTTTTTAAAATGAAAAGTTUAGATUUATGGGGTAGG |
| | GTAGAGTGGGUUTGGAGGGAG |
| 292 | TUUUTUUAGGUUUAUTUTAUUUTAUUUUATGGATUTGAAUTTTTUATTTTAAAAAU |
| | AUAAAGGGAAAATGGGAAAATAATAATAATAUTATUAGTGATGGUATTTTUURGGG |
| | UTUUTAAAGUAGUTGUUTUUTTTTGUTGGTUTGAGAXGGGUATUTTTTUUUAAAAG |
| | GUUAGGAGUURGGGUUUUTUUUTGTUTUTUTGGUTUTUATATAGAAAUTTGUAU |
| | RGGUUUATGUUAUAAAGAAUTGGGTGUUUAGGGGUAUTTAGGAGUTGGGTGAGTU |
| | ATGAGGGGTUAGGGGGTGGTT |
| 293 | GUAGUARGUAGUUUUUAGGGGUUUTAAUTUAUUUUUTUTTUUUTUAUAGGGUTTU |
| | UUTGURGTUUAGTGTTGGGTGAGAAAGGTGGAGGGGAUATGTAGUUURGGATGGAG |
| | GTGUAGUAUUAARGAGAGAGUTURGGUUTGTGGGAGGGAXGUTUAGGUTTAGGTU |
| | AAAGUUAGGAGUTURGGGAAAUUTGGGTTUAGURGUUARGUUUUARGGAGGGGAU |
| | AUAUUUTTUUUTGUUTGATGGUAGGGUUUATGGTAGAUAAAAUUUATGAUUTUAU |
| | UTUTUUTGGUTUUAGGGUTUAGUU |
| 294 | GGUTGAGUUUTGGAGUUAGGAGAGGTGAGGTUATGGGTTTTGTUTAUUATGGGUUU |
| | TGUUATUAGGUAGGGAAGGGTGTGTUUUUTURGTGGGGRGTGGRGGUTGAAUUUA |
| | GGTTTUURGGAGUTUUTGGUTTTGAUUTAAGUUTGAGXGTUUUTUUUAUAGGURGG |
| | AGUTUTUTRGTTGGTGUTGUAUUTUUATURGGGGUTAUATGTUUUUTUUAUUTTTUT |
| | UAUUUAAUAUTGGARGGUAGGGAAGUUUTGTGAGGGAAGAGGGGGTGAGTTAGGG |
| | UUUUTGGGGGUTGRGTGUTGU |
| 295 | ATTTUTTTUTAUUTGTUATTGAAGTGAATUATUAGTATAAGTAGRGAGUTGGGRGUA |
| | TTUUTTUTUAGTTGTGTTAAAAUTTGUTGGTATTUUUURGGTATUAGUAGAGGTGTG |
| | TARGGGUAUTGUTTTAAAAUTGGGAAGGAGGAAGAXGAGGUUAGGGAGURGGAGG |
| | GTUAUUAAGGTAGATTTUUAGUAGRGUTAGTUUAGUTGAAUAUTTTUUAGUUTTGT |
| | TTTTUAGUAGUTTTGAGGAAAAGTATAGGTAAGAAUAAAGAUAUUAUTGTATGTTT |
| | GUTATATGAATGUATAAUA |
| 296 | GTTATGUATTUATATAGUAAAUATAUAGTGGTGTUTTTGTTUTTAUUTATAUTTTTUU |
| | TUAAAGUTGUTGAAAAAUAAGGUTGGAAAGTGTTUAGUTGGAUTAGRGUTGUTGGA |
| | AATUTAUUUTGGTGAUUUTURGGUTUUUTGGUUTXGTUTGAATTUUUGGUUATTA |
| | AAGUAGTGUURGTAUAUAUUTUTGUTGATAURGGGGGAATAUUAGUAAGTTTTAAU |
| | AUAAUTGAGAAGGAATGRGUUUAGUTRGUTAUTTATAUTGATGATTUAUTTUAATG |
| | AUAGGTAGAAAGAAATG |
| 297 | ATTGGTUTGGTUUTUTTTUTAAUAUUTUUUAUURGGGATGUAGUUAAGAGTGGUTG |
| | UAGUUTAATTTTUTAUATGTAAAUAATGAUUTUAGTGATGUUUARGGGGUUUUTUT |
| | UTGGUUTTUTUUUUUTGGGAAAAGAUTGAGTTUTRGAXGGGUATUUUUTUUUUUTU |
| | RGGAAUUAAGGGUTUTGGGATGTTGAUAGUUUURGUUAUUTUTGAGAAGGGUAGG |
| | URGTGGAAAAUUATUTUUTUUUTTUUTTUUUUUTUTGUTUTUUTAGUTGGGGUUT |
| | UTGUAUAATGUAGUTGGGUUA |
| 298 | TGGUUUAGUTGUATTGTGUAGAGGUUUUAGUTAGGAAAGGUAGAGGGGGAAGGAA |
| | GGGAGGAGATGGTTTTUUARGGUUTGUUUTTUTUAGAGGTGGRGGGGGUTGTUAAU |
| | ATUUUAGAGUUUTTGGTTURGGAGGGGGAGGGGATGUUXGTRGAGAAUTUAGTUTT |
| | TTUUUAGGGGGAGAAGGUUAGAGAGGGGUUURGTGGGUATUAUTGAGGTUATTGT |
| | TTAUATGTAGAAAATTAGGUTGUAGUUAUTUTTGGUTGUATUURGGGTGGGAGGTG |
| | TTAGAAAGAGGAUUAGAUUAAT |
| 299 | TTGUUUTUATUTUUAGGUTTTGGAGGAGGGTAGGTGUUTGGUUAGUAGAGTGGUUA |
| | UTGUTUAUTGGUUUAGAGGAAGUAAGGUUAUUAGUUTGATUUUAUTTUTUUUTUR |
| | GGUUUATUTTUAUTUUUUTUTUUTUAAUUAUAAGUUUXGUUAAAATAGAGAUUUU |
| | RGGUTTTGUTUUUUTGUTGUAGGAAGGGAGAGUUAURGUUAGAUAUTGUUTGUUT |
| | GGTUUTUUTGTTUTGATUTUAUURGGTGUTTGGAATUAAAGAGGAUUTGGUTTUUU |
| | TUTRGGGATARGTGATTTTUTTT |
| 300 | AAGAAAATUARGTATUURGAGAGGGAAGUUAGGTUUTUTTTGATTUUAAGUAURGG |
| | GTGAGATUAGAAUAGGAGGAUUAGGUAGGUAGTGTUTGGRGGTGGUTUTUUUTTU |
| | UTGUAGUAGGGGAGUAAAGURGGGGGTUTUTATTTTGGXGGGGUTTGTGGTTGAGG |
| | AGAGGGGAGTGAAGATGGGURGGAGGGAGAAGTGGGATUAGGUTGGTGGUUTTGU |
| | TTUUTUTGGGUUAGTGAGUAGTGGUUAUTUTGUTGGUUAGGUAUUTAUUUTUUTUU |
| | AAAGUUTGGAGATGAGGGUAAG |
| 301 | GUUUAGATUAGGUAGRGGGGTRGUUUTUTUUAGGAUTUTUAAGGUAGUTAAGGUT |
| | GGAGGRGURGGRGAGUUTGGAGAGGGAGGAGTTUAUTAAATTGTGTTGGATGGAAG |
| | GRGTRGAGGAURGGAGGAATTAATURGATGTGGGGAAGGXGGARGGGGUTARGAG |
| | GAAAAAAGAGGGGGUAATGTAUAUTUAGUUTTTTUATUAUTRGGRGGGGAGATGGA |
| | TGGTTTTURGGAURGGGRGTUUUAGRGUUURGGTTAGUTATAGGGAGARGTUAGAG |
| | RGUTUTGGTURGRGATAGAAGA |
| 302 | TUTTUTATRGRGGAUUAGAGRGUTUTGARGTUTUUUTATAGUTAAURGGGGRGUTG |
| | GGARGUURGGTURGGAAAAUUATUUATUTUUURGURGAGTGATGAAAAGGUTGAG |
| | TGTAUATTGUUUUUTUTTTTTTUUTRGTAGUUURGTUXGUUTTUUUUAUATRGGATT |
| | AATTUUTURGGTUUTRGARGUUTTUUATUUAAUAUAATTTAGTGAAUTUUTUUUTUT |
| | UUAGGUTRGURGGRGUUTUUAGUUTTAGUTGUUTTGAGAGTUUTGGAGAGGGRGAU |
| | UURGUTGUUTGATUTGGGU |
| 303 | ATTTGGUTTGATUTTATTTTTAATATTTTTTAUAUTTTUTUTUTAAAGAAAA |
| | RGAGTGAATATRGTGATGGGTGUAGTTATGUTGAATAATTGGATGGGAGGARGTGU |
| | UAGGRGATUTUUAGUUUUTGGGAGURGGARGUUUAXGUTTTUUUTUTGUUTRGTTUT |
| | UAUAGAUAUATTTGTGGGGTGATTAAUTUAGGAATTUATGUTGUTUAAAGTAAUTA |
| | UAGTGGTGAGTGTTTTGAURGGTTTGATGTAGAAATUAAGGAAAAUAUUAGAAAAA |
| | TUAGGGGRGGAGGUUUAA |
| 304 | TTGGGUUTURGUUUUUGATTTTTUTGGTGTTTTUUTTGATTTUTAUATUAATTGT |
| | AAAAUAUTUAUUAUTGTAGTTAUTTTGAGUAGUATGAATTUUTGAGTTAATUAUUU |
| | UAUAAATGTGTUTGTGAGAARGAGGUAGAGGGAGGXGTGGGRGTURGGUTUUUAG |
| | GGGUTGGAGATRGUUTGGUARGTUUTUUUATUUAATTATTUAGUATAAUTGUAUUU |
| | ATUARGATATTUAUTRGUUTTTTTTTTUTTTAGAGAGAAAGTGTAAAAAATATTAAA |
| | AATAAGATUAAGUUAAAT |
| 305 | TGAUTTTTTUATTTUTUTUAAGATGATUATTAGGAGTGGTTTUAAUAAAAUTGAAUA |
| | UAGAATTTTGAGGGUUUUAATUATGAUTUAAUUAGAGUUUTUUUTGAATTUTTUAT |
| | GAGTUAGUURGGUUUTUUUUAUTGAUTTUAUUUTAGXGGGUAUUTGTUTTTUTTUT |
| | TUTTTTATUAUTTTTTGUTTUTUTTTTGGTTTUUAGUTUTGGTTTTUTUUGAATA |
| | UAUUTTUUAATTUTTUURGGUUUUUTUAGGGAAAUUUAGAGGUAAATTTGAGTGUA |
| | GGGAGRGGGGGUTTRGU |
| 306 | GRGAAGUUUURGUTUTUTGUAUTUAAATTTGUUTUTGGGTTTUUUTGAGGGGGURG |
| | GGAAGAATTGGAAGGTGTTGGGTUTGAATTUAGTUAGAGUTGGAAAUUAAAAGAGA |
| | AGUAAAAAGTGATAAAAGAAGAAGAAAGAUAGGTGUUXGUTAGGGTGAAGTUAGT |
| | GGGGAGGGURGGGUTGAUTUATGAAGAATTUAGGGAGGGUTUTGGTTGAGTUATGA |
| | TTGGGGUUUTUAAAATTUTGTGTTUAGTTTTGTTGAAAUUAUTUUTAATGATUATUT |
| | TGAGAGAAATGAAAAAGTUA |
| 307 | GGTGTUAGGAGTGGUUUAGGAGAGUAUUURGTTUUURGGUURGUAGGTGGTGTTTG |
| | UTGGUTUUAGUAGGGUUAGGAGGUUAUUTGUAGUUTGGTGUTUUAGAUTGATGTU |
| | AUURGGGURGAGTGUTGTGUUTURGGUAAUATTGAUAUXGUUTGGTUUAAUUTUA |
| | UUUAUURGGGGAAUAAGATUAAUUTUUTRGGUTTTTTTGGGUUTTGTUUAUTGUUTT |
| | UUUTGUAAAGGTGAGAUUTUAGGUUAGAAGUAGGGUAGARGTUTUAGUTUAGGAU |
| | UAGUUAUAAAUAGTUATGGTGGT |
| 308 | AUUAUUATGAUTGTTTGTGGUTGGTUUTGAGUTGAGARGTUTGUUUTGUTTUTGGU |
| | UTGAGGTUTUAUUTTTGUAGGGAAGGUAGTGGAUAAGGUUUAAGAAGURGAGGAG |
| | GTTGATUTTGTTUUURGGGTGGGTGAGGTTGGAUUAGGXGGTGTUAATGTTGURGG |
| | AGGUAUAGUAUTRGGUURGGGTGAUATUAGTUTGGAGUAUUAGGUTGUAGGTGGU |
| | UTUUTGGUUUTGUTGGAGUUAGUAAAUAUUAUUTGRGGGURGGGGAARGGGGTGU |
| | TUTUUTGGGUUAUTUUTGAUAUU |
| 309 | GUAGUUUTUTTUAUUTGUUTGGTGAUTUAUTAUAAGUUUTGGGGGAAGGAATGGU |
| | AGTGGUUUTUTTUAUUTTTAUTGUUTUTGRGGUUAUAATGGGUAGTTGAUATAAUU |
| | AUUTGUAGGUUURGGGAGUUATXGGGGUUTUTTGAUAXGTGUTUATTAGTGGUTTU |
| | TGAGGAGRGUUTGUUUUAUUTGUUUUAXGTGUUUUUAXGTUTGGUUAUTUUAGGG |
| | TUUATTAGRGUTAATRGGUAAATGUUTGTGUTUTUATUTAURGGGAAAAUATUTUU |
| | UTTUTUUAGAGRGGAGGUUAGU |
| 310 | UTGGUUTURGUTUTGGAGAAGGGAGATGTTTTUURGGTAGATGAGAGUAUAGGUAT |
| | TTGURGATTAGRGUTAATGGAUUUTGGAGTGGUUAGAXGTGGGGGUAXGTGGGGUA |
| | GGTGGGGUAGGRGUTUUTUAGAAGUUAUTAATGAGUAXGTGTUAAGAGGUUUXGA |
| | TGGUTUURGGGGUUTGUAGGTGGTTATGTUAAUTGUUUATTGTGGURGUAGAGGUA |
| | GTAAAGGTGAAGAGGGUUAUTGUUATTUUTTUUUUUAGGGUTTGTAGTGAGTUAUU |
| | AGGUAGGTGAAGAGGGUTGUT |
| 311 | GTGGUUUTUTTUAUUTTTAUTGUUTUTGRGGUUAUAATGGGUAGTTGAUATAAUUA |
| | UUTGUAGGUUURGGGAGUUATRGGGGUUTUTTGAUAXGTGUTUATTAGTGGUTTUT |
| | GAGGAGRGUUTGUUUUAUUTGUUUUAXGTGUUUUUAXGTUTGGUUAUTUUAGGGT |
| | UUATTAGRGUTAATRGGUAAATGUUTGTGUTUTUATUTAURGGGAAAAUATUTUUU |
| | TTUTUUAGAGRGGAGGUUAGUUTAAAAAUUAGGUURGUAGUUTURGAGGUTUTGA |
| | AAAUUAAGRGGUTGTTUTGGTU |
| 312 | AUUAGAAUAGURGUTTGGTTTTUAGAGUUTRGGAGGUTGRGGGUUTGGTTTTTAGG |
| | UTGGUUTURGUTUTGGAGAAGGGAGATGTTTTUURGGTAGATGAGAGUAUAGGUAT |
| | TTGURGATTAGRGUTAATGGAUUUTGGAGTGGUUAGAXGTGGGGGUAXGTGGGGUA |
| | GGTGGGGUAGGRGUTUUTUAGAAGUUAUTAATGAGUAXGTGTUAAGAGGUUURGA |
| | TGGUTUURGGGGUUTGUAGGTGGTTATGTUAAUTGUUUATTGTGGURGUAGAGGUA |
| | GTAAAGGTGAAGAGGGUUAUT |
| 313 | ATGGGUUUTGGGGURGURGUUTUAGTGTUTTUTGGTGUTGUAGURGGGUAGGGURG |
| | AAUUUTGGRGUAUAGUTTUUTGUTGAGTUTUUUTUTUTAAGGUTGTUTGTGGGRGG |
| | UTUTGURGGUUUUTUUTGUAUUTGUUUAGGUUUTGGGXGGAGGUTUUTUUTUURG |
| | GGGGGGUTGTGGUUTUAGUAUAGAUUAGGGGAUAGAAGGTGGUTUTTUTTGGUUTT |
| | GGUTGGGTGTGAAUUAAAGAUTTUUTGTAAGAAATUUUUUTUTUUUTUTUUUTUUT |
| | TRGUTUUUTUATUTUTUTUUU |
| 314 | GGGAGAGAGATGAGGGAGRGAAGGAGGGAGAGGGAGAGGGGGATTTUTTAUAGGA |
| | AGTUTTTGGTTUAUAUUUAGUUAAGGUUAAGAAGAGUUAUUTTUTGTUUUUTGGTU |
| | TGTGUTGAGGUUAUAGUUUUUURGGGAGGAGGAGUUTUXGUUUAGGGUUTGGGUA |
| | GGTGUAGGAGGGGURGGUAGAGURGUUUAUAGAUAGUUTTAGAGAGGGAGAUTUA |
| | GUAGGAAGUTGTGRGUUAGGGTTRGGUUUTGUURGGUTGUAGUAUUAGAAGAUAU |
| | TGAGGRGGRGGUUUUAGGGUUUAT |
| 315 | UAUTGGAUUATUUAUAUAAUTTTTGAGGATUAGTGGAAATGAAAAUARGGTGUUUR |
| | GGUAUAAAAUATATTTUATAGUTTGGGTTAGGUAAUAGUAAAGUATUARGUTGAGR |
| | GURGGGAUUTTUTGAGTGUAGGXGGTGGGXGAAGUUURGAGTUAUAUAUAUUUAR |
| | GAXGURGGUUUTGUTUUUAUAGRGGUUUTUTGGGGTAGRGAUTGGTATTAUUTGUA |
| | TTTUARGAGGGAGGAAAUTGAGGUARGAAUTGTTUAGAAGUTGUUUTGAGGTUAUU |
| | AAGTGAGUTAGGAAGAGGRGT |
| 316 | RGUUTUTTUUTAGUTUAUTTGGTGAUUTUAGGGUAOUTTUTGAAUAGTTRGTGUUT |
| | UAGTTTUUTUUUTRGTGAAATGUAGGTAATAUUAGTRGUTAUUUUAGAGGGURGUT |
| | GTGGGAGUAGGGURGGXGTRGTGGGTGTGTGTGAUTRGGGGUTTXGUUUAUXGUUT |
| | GUAUTUAGAAGGTUURGGRGUTUAGRGTGATGUTTTGUTGTTGUUTAAUUUAAGUT |
| | ATGAAATATGTTTTGTGURGGGGUAURGTGTTTTUATTTUUAUTGATUUTUAAAAGT |
| | TGTGTGGATGGTUUAGTGT |
| 317 | UTUUAGTGTGUUTUAGTTGGTTTATUTGTAAAAATGGGGUUAGGUUARGAUTGGTG |
| | TTUUUTTTAUAGAGAAGUAUTUUAGGUAGGGGTGGGTGGGGGTGGAAUTRGTTUTU |
| | AATGGUUUURGGGAUAGUUUTGUAGUUAURGGTGAUTXGGGTTXGTUTGRGGATUT |
| | TTUURGGUUTUUAUTUUATTUAGGGAUAGUUUTGUAATGGGGUTUUUTUUUAAAA |
| | AAARGUATGGUUTTUUTGTUUUUUAAAAUUAGUTTAARGGUAGUUATTUUUTUUUT |
| | UUTURGGGGGUTGAAAAAUUA |
| 318 | GGTTTTTUAGUUUURGGAGGAGGGAGGGAATGGUTGURGTTAAGUTGGTTTTGGGG |
| | GAUAGGAAGGUUATGRGTTTTTTTGGGAGGGAGUUUUATTGUAGGGUTGTUUUTGA |
| | ATGGAGTGGAGGURGGGAAAGATURGUAGAXGAAUUXGAGTUAURGGTGGUTGUA |
| | GGGUTGTUURGGGGGUUATTGAGAARGAGTTTTUAUUUUUAUUUAUUUUTGUUTGG |
| | AGTGUTTUTUTGTAAAGGGAAUAUUAGTRGTGGUUTGGUUUUATTTTTAUAGATAA |
| | AUUAAUTGAGGUAUAUTGGAGG |
| 319 | UAUTUARGGGUTAGUTURGTUAGGTGTTGARGGATGTUAUTUAGGTGTGAGUTUTG |
| | UAUUTGAGUTUUUUUUTGUAUAUAGGUAGUUAUAAUUAGTUAGTGUAGAGGTGAG |
| | UTTTGTGGUUAGTGAGGAGURGGTGAGTUAAUUTUUTUUXGUUTARGGGUUUTGAG |
| | ARGURGGUTURGTGAGUTTGRGGGGTRGAGGGRGUUTATATTAAGUUAAGGUTGAG |
| | GUAGTGAUAUAUUUTUTTATGGGUUTGUTUTRGUTTUUTGUTTUATTGTUUTGGTUT |
| | UTUUUTUTRGTATGGAGGATUA |
| 320 | TGATUUTUUATARGAGAGGGAGAGAUUAGGAUAATGAAGUAGGGAGRGAGAGUAG |
| | GUUUATAAGAGGGTGTGTUAUTGUUTUAGUUTTGGUTTAATATAGGRGUUUTRGAU |
| | UURGUAAGUTUARGGAGURGGRGTUTUAGGGUURGTAGGXGGGAGGAGGTTGAUT |
| | UAURGGUTUUTUAUTGGUUAUAGGUTUAUUTUTGUAUTGAUTGGTTGTGGUTGUUT |
| | GTGTGUAGGGGGGAGUTUAGGTGUAGAGUTUAUAUUTGAGTGAUATURGTUAAUA |
| | UUTGARGGAGUTAGUURGTGAGTG |
| 321 | UUAGGUTGUUTGGGTTTTGGTUTUUAUUATGUTAGUTTGGTGTURGAUUTGTGTTGAGAUUU |
| | TUUUTGUUTUTGGUURGGGTGTUUUATUUAAGUAATGGAUAGGTTGGAAUAGGXGTTXGTA |
| | GGGAAXGGGUTGAAXGUURGRGGUTUUXGXGATGTUTXGXGATAUTAUUTUUUTXGUUUUX |
| | GUTUAUTTAAGGAURGGAAGTAGUAAAGUURGURGTRGRGUUUUURGUUURGRGTUTUUUT |
| | GGTAAUUAGUUTUTUUUUTTUUUTRGUUUATAAGGAGUAAGRGGUAUAAATRGGG |
| 322 | UURGATTTGTGURGUTTGUTUUTTATGGGRGAGGGAAGGGGAGAGGUTGGTTAUUAGGGAGA |
| | RGRGGGGRGGGGGGRGRGARGGRGGGUTTTGUTAUTTURGGTUUTTAAGTGAGXGGGGGXG |
| | AGGGAGGTAGTATXGXGAGAUATXGXGGGAGURGRGGGXGTTUAGUUXGTTUUUTAXGAAX |
| | GUUTGTTUUAAUUTGTUUATTGUTTGGATGGGAUAUURGGGUUAGAGGUAGGGAGGGTUTU |
| | AAUAUAGGTRGGAUAUUAAGUTAGUATGGTGGAGAUUAAAAUUUAGGUAGUUTGG |
| 323 | UAATGGUUTUTTTUTTUAGUUTRGGTGGGRGTGGUTGGGGGAAUUUUAGGGRGGGR |
| | GGGGGGUAGGGGGTGGTGUTGAGTUAUUUAGUUTGGUUAGGTUUUTGUUTGUUAG |
| | UUUUUTGUUUUUAURGUTAUAGUURGUUURGGATUTAXGAGGUUUAGUUAGUUAU |
| | UTUTGGAUTUUTGAGAUXGAATTGUAAAUTGUURGGGUUTGGUUTTGAAUTUUTGU |
| | TGTTTAGGGAUUAAGTUUTGTGGUTUUUAGGGGGGUAUAGTGATUTUTUAAGUTGA |
| | GUTGGUUTUAGGGUUTUTGUAU |
| 324 | TGUAGAGGUTTTGAGGUUAGUTUAGUTTGAGAGATUAUTGTGUUUUUUTGGGAGU |
| | UAUAGGAUTTGGTUUUTAAAUAGUAGGAGTTUAAGGUUAGGUURGGGUAGTTTGU |
| | AATTXGGTUTUAGGAGTUUAGAGGTGGUTGGUTGGGUUTXGTAGATURGGGGRGGG |
| | UTGTAGRGGTGGGGGUAGGGGGUTGGUAGGUAGGGAUUTGGUUAGGUTGGGTGAU |
| | TUAGUAUUAUUUUUTGUUUUURGUURGUUUTGGGGTTUUUUUAGUUAGGGTGGTTA |
| | GAGGUTGAAGAAAGAGGUUATTGT |
| 325 | AUUUTGTGUAGGGUUTGUATUURGGAAGGUUTUUAUUAGUURGAAUUTGGUURGT |
| | URGUUUTAGATGGGGUAATRGGRGTTTUTUURGGGAUAGUUTUUTUUUTGGUUTUU |
| | TGGUUUTRGTUTGUATTGAGAGGUTTGGUUTUTGGTUXGUATGUTGUUUTTUURGT |
| | GUTGTGGUUTTGUAGUURGGUUTUTUUUUTGUTGTUUUUUTTGGUTUTGGUUTGGU |
| | UUUTGGGUUUUTGAGTUAUUUUTGAGGTGAUTUAGUAGTUUTTGGAAARGUATGUR |
| | GAGGARGUAUUUTGUUTGGUU |
| 326 | GUUAGGUAGGGTGRGTUUTRGGUATGRGTTTUUAAGGAUTGUTGAGTUAUUTUAGG |
| | GGTGAUTUAGGGGUUUAGGGGUUAGGUUAGAGUUAAGGGGGAUAGUAGGGGAGA |
| | GGURGGGUTGUAAGGUUAUAGUARGGGAAGGGUAGUATGXGGAUUAGAGGUUAA |
| | GUUTUTUAATGUAGARGAGGGUUAGGAGGUUAGGGAGGAGGUTGTUURGGGAGAA |
| | ARGURGATTGUUUUATUTAGGGRGGARGGGUUAGGTTRGGGUTGGTGGAGGUUTTU |
| | RGGGATGUAGGUUUTGUAUAGGGTT |
| 327 | GGAAUUATTGTTUTGUTGUUUAUAGUTGRGTGGAGGGATTURGGTUUTRGGGTTUA |
| | GTTGGTGAUAGTGTRGGGTAGGUUTGGGUAGGTGGGAGAGGTRGTGAAGUUUTTTG |
| | UAGGGUAUTTGGURGUTUATUTGGUAUAGGGGAAGAGGXGUAGUURGTGGUURGG |
| | UAGTUUAGGAUUTGUTGTTUUUTTUUTAUURGGGGRGGGGUUTGTGGGAAGATATG |
| | GAAGTRGGGTGAATGAGURGTGUUUAGTGATTTTAAAAAGUAGATTAAAATAAUAT |
| | AGAAAATGTUAGAGUTUATTG |
| 328 | UAATGAGUTUTGAUATTTTUTATGTTATTTTAATUTGUTTTTTAAAATUAUTGGGUAR |
| | GGUTUATTUAUURGAUTTUUATATUTTUUUAUAGGUUURGUUURGGGTAGGAAGGG |
| | AAUAGUAGGTUUTGGAUTGURGGGUUARGGGUTGXGUUTUTTUUUUTGTGUUAGAT |
| | GAGRGGUUAAGTGUUUTGUAAAGGGUTTUARGAUUTUTUUUAUUTGUUUAGGUUT |
| | AUURGAUAUTGTUAUUAAUTGAAUURGAGGAURGGAATUUUTUUARGUAGUTGTG |
| | GGUAGUAGAAUAATGGTTUU |
| 329 | GUATUUTUAUUTGRGTURGAAGRGUAGATGGAGUUUAAGGGAAAGGUUUTGTAGA |
| | GGAUUURGTGTGAUTTGGGGUAAAGRGTGGUUTUUUAGGGGTGRGTGGGUAGRGG |
| | GARGUUUATGGTGTGAURGGGTTTGTGUUTUUATAGGGAUXGTUTGUUUTGTGUAG |
| | AGAGUUUUTGTGGGGXGGGAAGTGGXGAGUAGURGGUAAGGAGGUUUAGUUAGA |
| | UAGAAGUAGGGGGGTUAGGGAUATGGGAGGTGGGGGAUUAGUUAGTGAGTUAGAR |
| | GTGAGGAUTTUAGTGUUAAGGAUTG |
| 330 | UAGTUUTTGGUAUTGAAGTUUTUARGTUTGAUTUAUTGGGUUTUTTUUUTGGTTUU |
| | ATGTUUUTGAUUUUUUTGUTTUTGTUTGGUTGGGUTTTUUTTGURGGUTGUTXGUUA |
| | UTTUUXGUUUUAUAGGGGUTUTUTGUAUAGGGUAGAXGGTUUUTATGGAGGUAUA |
| | AAUURGGTUAUAUUATGGGRGTUURGUTGUUUARGUAUUUUTGGGAGGUUARGUT |
| | TTGUUUUAAGTUAUARGGGGTUUTUTAUAGGGUUTTTUUUTTGGGUTUUATUTGRG |
| | UTTRGGARGUAGGTGAGGATGU |
| 331 | AGGTTUUUUATUUTAGUTUUURGGATUTUUATAGGGAGTGTUUAGGGAUUUTUAAT |
| | UTUUAGGGUUAUTTUTGUAGGAGUTRGGGTTRGAGGTTUUARGTGGUUAGAAGAGU |
| | TUAGGTUTUTGAGGGUTGGTGTGUURGGGTAUUUATUXGUATUAUTGUTUTUUTUU |
| | TGTURGGUTARGUUUAGGGUTGAGTGARGGTGGTGGUAAGTGUTTGTUUTUAGGGU |
| | AGRGAGGTUTTUTGTTUTGAUAGUAGUAGGGAUTUUTTUATGGUUAUUAGTAAUUU |
| | UAGTGGGRGGAGGRGUTUUT |
| 332 | AGGAGRGUUTURGUUUAUTGGGGTTAUTGGTGGUUATGAAGGAGTUUUTGUTGUTG |
| | TUAGAAUAGAAGAUUTRGUTGUUUTGAGGAUAAGUAUTTGUUAUUAURGTUAUTU |
| | AGUUUTGGGRGTAGURGGAUAGGAGGAGAGUAGTGATGXGGATGGGTAUURGGGU |
| | AUAUUAGUUUTUAGAGAUUTGAGUTUTTUTGGUUARGTGGAAUUTRGAAUURGAG |
| | UTUUTGUAGAAGTGGUUUTGGAGATTGAGGGTUUUTGGAUAUTUUUTATGGAGATU |
| | RGGGGAGUTAGGATGGGGAAUUT |
| 333 | TUUTTUUTTUTTTUUTTUTTTUTTUUTTUUUTTUTUUTTTUTTTUTTUUTTTUU |
| | UATTTTGAGARGTAUTUTGGUTUTGTRGUUUAGGUTGGAGRGUAATGGRGUUATUT |
| | RGGRGUAUTGUAAUUTUUAUUTUURGGGTTUAAGXGATTUTAUTGUUTUAGUUTUU |
| | RGAGTAGUTGGGAUTAUAGGRGRGUAUTAUUAAGUURGGUTAATTTTTTTTTGTATT |
| | TTTAGTAGAGAUTGGGTTTUARGATGTTGGURGGGUTGGTUTGGAAGTUTTGAUUTU |
| | AAGRGTGRGUUUTU |
| 334 | GAGGGRGUARGUTTGAGGTUAAGAUTTUUAGAUUAGUURGGUUAAUATRGTGAAA |
| | UUUAGTUTUTAUTAAAAATAUAAAAAAAAATTAGURGGGUTTGGTAGTGRGRGUUT |
| | GTAGTUUUAGUTAUTRGGGAGGUTGAGGUAGTAGAATXGUTTGAAUURGGGAGGTG |
| | GAGGTTGUAGTGRGURGAGATGGRGUUATTGRGUTUUAGUUTGGGRGAUAGAGUU |
| | AGAGTARGTUTUAAAATGAAAGAAGAGAAAAGAAAAGAAAAGAAAGAAAAGAGAG |
| | AGAAAGAAGGAAAGAAGGAAGGA |
| 335 | AGGUUTUTGUTGAUUTGTAGAAUTTGTTGAUURGGATTTTGATGTUAGTUTUATTGG |
| | GUUTGURGTTGUTUTTUTTGGGAUAGAAGATUTUTTTGATURGGUUAATTRGGTAGG |
| | GUTUAGGGGUATUUAGGTTGUTGUUTTTGATGTAGTXGGAGTATTTURGGTAGTGUT |
| | UTGGGTAUAGGTUUTUATUUARGGGUTUUTTURGTGGGRGTTTUARGGGAUTGGAU |
| | AGUTTGATGUTGUAGAGAAGUAUUUAUTTGAUATUAATGAAUUTTUUAUUTTGUAG |
| | TGGTUAGTUAGGUATGA |
| 336 | TUATGUUTGAUTGAUUAUTGUAAGGTGGAAGGTTUATTGATGTUAAGTGGGTGUTT |
| | UTUTGUAGUATUAAGUTGTUUAGTUURGTGAAARGUUUARGGAAGGAGUURGTGG |
| | ATGAGGAUUTGTAUUUAGAGUAUTAURGGAAATAUTUXGAUTAUATUAAAGGUAG |
| | UAAUUTGGATGUUUUTGAGUUUTAURGAATTGGURGGATUAAAGAGATUTTUTGTU |
| | UUAAGAAGAGUAARGGUAGGUUUAATGAGAUTGAUATUAAAATURGGGTUAAUAA |
| | GTTUTAUAGGTUAGUAGAGGUUT |
| 337 | GGGGRGGGGTTRGGURGGGGGRGGRGGUAGGAUUTGAGUAGUUAGGAGGGUTGGGGGAUA |
| | GTUAGGTUAGGURGGTGGUTAUURGGURGUTGGAGAGGGURGGATGGUARGTGGUAUUAAG |
| | UAAAAGGAGGUTGAGUUAGAAAGUAGGGAXGGGGUTAGARGAGUAAAGUTGGGUAGGAGG |
| | GRGAGTTGGGAGGGGURGAGURGGUTGTGRGTGGTUUUTTGGGAGGAGGGGGTGTGGUUAA |
| | GUAAGUUAAAUAGTTRGGAGGTUAGTGUAAGGAUAAGAUAGUUTGGGUAAARGAGUAG |
| 338 | UTGUTRGTTTGUUUAGGUTGTUTTGTUUTTGUAUTGAUUTURGAAUTGTTTGGUTTGUTTGGU |
| | UAUAUUUUUTUUTUUUAAGGGAUUARGUAUAGURGGUTRGGUUUUTUUUAAUTRGUUUTUU |
| | TGUUUAGUTTTGUTRGTUTAGUUUXGTUUUTGUTTTUTGGUTUAGUUTUUTTTTGUTTGGTGU |
| | UARGTGUUATURGGUUUTUTUUAGRGGURGGGTAGUUAURGGUUTGAUUTGAUTGTUUUUU |
| | AGUUUTUUTGGUTGUTUAGGTUUTGURGURGUUUURGGURGAAUUURGUUUU |
| 339 | RGAGTTGGGAGGGGURGAGURGGUTGTGRGTGGTUUUTTGGGAGGAGGGGGTGTGG |
| | UUAAGUAAGUUAAAUAGTTRGGAGGTUAGTGUAAGGAUAAGAUAGUUTGGGUAAA |
| | RGAGUAGGGGRGGAGRGTGAGAGUAGAUTGUAURGGATXGUTUAGGUUAGUUUAA |
| | GUTGAAGAGGAAGGGGUAAGUTUUAGAAGUAGGGGRGGGGURGAUUAAUUTRGUA |
| | GATUTGUTGGGRGAAGAGUAGUAGUTGGGUUAGUURGATGUTGTGURGGGGUAGG |
| | TAGTUTRGGAGGUTGUUUAGGGGU |
| 340 | UUUUTGGGUAGUUTURGAGAUTAUUTGUUURGGUAUAGUATRGGGUTGGUUUAGU |
| | TGUTGUTUTTRGUUUAGUAGATUTGRGAGGTTGGTRGGUUURGUUUUTGUTTUTGG |
| | AGUTTGUUUUTTUUTUTTUAGUTTGGGUTGGUUTGAGXGATURGGTGUAGTUTGUT |
| | UTUARGUTURGUUUUTGUTRGTTTGTAGGUTGTUTTGTUUTTGUAUTGAUUTURG |
| | AAUTGTTTGGUTTGUTTGGUUAUAUUUUUTUUTUUUAAGGGAUUARGUAUAGURGG |
| | UTRGGUUUUTUUUAAUTRGU |
| 341 | AAUAGGUUUAAGUUTGTGGUAGGTGGGGGTUAUUUAGUUUAGGRGUTTUUUAUUU |
| | URGGGUUTGGGUUAGAAGUUUAGGAGUTGGUTGRGGGURGGTTUTUUUUUAUUUA |
| | UTUTGGGGATGUUTUAGGUUTGGGTTTURGUUTTAGUUTXGUUAGGUUUUAATGAG |
| | UUTUTGTTTGGUUTGTAGTUAATTGAURGGTTGGAUTTGGGGUAGGTGUTRGAGGA |
| | GUUUUAUTGAGGGAGGGUAGGTUTUTTGTGRGTAUTGTUUAGUAUATAUAGGAAAT |
| | TTAGUATTTUTGUUUAUUUAGU |
| 342 | GUTGGGTGGGUAGAAATGUTAAATTTUUTGTATGTGUTGGAUAGTARGUAUAAGAG |
| | AUUTGUUUTUUUTUAGTGGGGUTUUTRGAGUAUUTGUUUUAAGTUUAAURGGTUA |
| | ATTGAUTAUAGGUUAAAUAGAGGUTUATTGGGGUUTGGXGAGGUTAAGGRGGAAA |
| | UUUAGGUUTGAGGUATUUUUAGAGTGGGTGGGGGAGAAURGGUURGUAGUUAGUT |
| | UUTGGGUTTUTGGUUUAGGUURGGGGGTGGGAAGRGUUTGGGUTGGGTGAUUUUU |
| | AUUTGUUAUAGGUTTGGGUUTGTT |
| 343 | UUTGAUUUAUUUAAUTUTUUUAGGGGARGTGGGGGUAUTGGAGUUUUAUAURGUA |
| | GGRGGTAGUTUAATGUAUURGRGTRGGAGTTUUTUUUURGRGAGRGTGGUAAGGUT |
| | UAGGGAAGTUURGGGUUUUTGGGGAGGGGGUUTTGURGXGUATUUTGTXGUAGGA |
| | AURGURGGGUUUTTUUTTURGRGGGAAGXGGUTTGGURGAUUUURGUUUURGUUR |
| | GGGUUTUTTGGGGGTTTURGGTGUURGGUUAURGTGGGGUTGGGGAUTGAAAGTGA |
| | TGGGAUTGAAGATGGGGUTGGAA |
| 344 | TTUUAGUUUUATUTTUAGTUUUATUAUTTTUAGTUUUUAGUUUUARGGTGGURGGG |
| | UAURGGAAAUUUUUAAGAGGUURGGGRGGGGGRGGGGGTRGGUUAAGUXGUTTUU |
| | RGRGGAAGGAAGGGUURGGRGGTTUUTGXGAUAGGATGXGRGGUAAGGUUUUUTU |
| | UUUAGGGGUURGGGAUTTUUUTGAGUUTTGUUARGUTRGRGGGGGAGGAAUTURG |
| | ARGRGGGTGUATTGAGUTAURGUUTGRGGTGTGGGGUTUUAGTGUUUUUARGTUUU |
| | UTGGGAGAGTTGGGTGGGTUAGG |
| 345 | TATUUAAATGTGTTTTATATAAAATGAATRGTTTTUAGTGUAUTGAGGAAGTTTTUT |
| | ATTTAAAGAAATUUTGUTGTGAAUTUTTTTGTGAAGAATGUTTTUUTAATGGAATTA |
| | GTUAUUAUTGAGTUATTTUTGUAAAUTTUAGGTTTGXGGTTTTGUUTAAGUAAGATU |
| | TGGURGGAGAAGTGAGATAAATTATAGATGTRGUTAATAAATTAUAGATTAUTUAA |
| | AGGUAAAAGAGGAAAGAAAAAAAAAAATTGAUTRGTGTATATGAAURGAATTGAGT |
| | UAGGGGTUTUUAURGGU |
| 346 | GURGGTGGAGAUUUUTGAUTUAATTRGGTTUATATAUARGAGTUAATTTTTTTTTTT |
| | UTTTUUTUTTTTGUUTTTGAGTAATUTGTAATTTATTAGRGAUATUTATAATTTATUT |
| | UAUTTUTURGGUUAGATUTTGUTTAGGUAAAAUXGUAAAUUTGAAGTTTGUAGAAA |
| | TGAUTUAGTGGTGAUTAATTUUATTAGGAAAGUATTUTTUAUAAAAGAGTTUAUAG |
| | UAGGATTTUTTTAAATAGAAAAUTTUUTUAGTGUAUTGAAAARGATTUATTTTATAT |
| | AAAAUAUATTTGGATA |
| 347 | TGGGAGTTUUAGTTRGGGGGUAGAUUAGTGTTUAGAGTURGGGUTUTGUTAUTUAG |
| | RGUURGAGGUAGRGUUTUUUUATTUAARGGGGGURGTGGUAATTUUUTGAUATGAT |
| | TUATGAUUAUATAATAUATURGGAAAUTTUTUTUUAUXGUUTUURGTUTGGGURGT |
| | RGUUUURGGUUTGGGAGAUTUUAGGTUTUAGAGTUTUTGUUUUUARGGGRGATUA |
| | GTGUTGUUUAGTGGAAAAATAATGUUAGURGRGUAUUAAAATTAGGTGTAAAATTA |
| | AUATTTTTTGGAAGUUAUTTT |
| 348 | AAGTGGUTTUUAAAAAATGTTAATTTTAUAUUTAATTTTGGTGRGRGGUTGGUATTA |
| | TTTTTUUAUTGGGUAGUAUTGATRGUURGTGGGGGUAGAGAUTUTGAGAUUTGGAG |
| | TUTUUUAGGURGGGGGRGARGGUUUAGARGGGAGGXGGTGGAGAGAAGTTTURGG |
| | ATGTATTATGTGGTUATGAATUATGTUAGGGAATTGUUARGGUUUURGTTGAATGG |
| | GGAGGRGUTGUUTRGGGRGUTGAGTAGUAGAGUURGGAUTUTGAAUAUTGGTUTGU |
| | UUURGAAUTGGAAUTUUUAT |
| 349 | RGGRGTGUTTUTTGGUAAAUATUTUUTTGAGGATGURGUTGUAGUAUTTGAGUTGU |
| | TURGAGAUTTTGUTGUTUTTUTUTGGTGUTGGGTGUTGUTGAGAGTRGGGUARGTUU |
| | TTUTTTGGAGGTTTUAUAGGURGGUTGUTUTUURGUXGUTGGUUUAGUTTGGTGGT |
| | UTTGGGUTURGGGGGUAGRGAGGGTGGUTRGTGAATGGGGTUAATGGTGGTGGGGG |
| | TGGTGGTGTUTGUTTTUUTUTTUAUTUUUTTUTTTGTUTGUUAAGAAUARGGARGUU |
| | AAUAGGUAUAGTUAGAAG |
| 350 | UTTUTGAUTGTGUUTGTTGGRGTURGTGTTUTTGGUAGAUAAAGAAGGGAGTGAAG |
| | AGGAAAGUAGAUAUUAUUAUUUUUAUUAUUATTGAUUUUATTUARGAGUUAUUUT |
| | RGUTGUUUURGGAGUUUAAGAUUAUUAAGUTGGGUUAGXGGRGGGAGAGUAGUR |
| | GGUUTGTGAAAUUTUUAAAGAAGGARGTGUURGAUTUTUAGUAGUAUUUAGUAUU |
| | AGAGAAGAGUAGUAAGGTUTRGGAGUAGUTUAAGTGUTGUAGRGGUATUUTUAAG |
| | GAGATGTTTGUUAAGAAGUARGURG |
| 351 | TGGTUTGUTTUAAGTUUTAUUTGGUUUUTGGUAAGTUUUAUTTGGTGAUATUTTGT |
| | GUUTGGGTUUTTGAGGGUTGUUUUAGATURGRGATTGTUUTGGGGAURGGTAGTTU |
| | UTUUURGGATGUUAGUAAAGUTUUUTUUAGUUTUUAXGUUTGUAUAGTUTUUAGT |
| | ATGUUTTUAAUAGUUATTAGTUAUUUTUTGTGAGTUAGAUUUURGGTUUTGUUAGG |
| | UUAAUUTGUTTGGGGUUTUAGUAGRGGGGGUTGGRGAGGUUAGTTTTUTUUAGRGG |
| | TTUTAAGURGUTRGAGGGTGG |
| 352 | UAUUUTRGAGRGGUTTAGAAURGUTGGAGAAAAUTGGUUTRGUUAGUUUURGUTG |
| | UTGAGGUUUUAAGUAGGTTGGUUTGGUAGGAURGUGGGTUUAUTUAUAUAUUUT |
| | GAUTAATGGUTGTTGAAGGUATAUTGGAGAUTGTGUAGGXGTGGAGGUTGGAGGGA |
| | GUTTTGUTGGUATURGGGGAGGAAUTAURGGTUUUUAGGAUAATRGRGGATUTGGG |
| | GUAGUUUTUAAGGAUUUAGGUAUAAGATGTUAUUAAGTGGGAUTTGUUAGGGGUU |
| | AGGTAGGAUTTGAAGUAGAUUAG |
| 353 | AUUTGGTRGGUUAURGGUAGUTRGGGGAAGAAGGGRGRGTGGRGRGUUUAUTUUA |
| | RGGTGUTGAAGAGUAGURGRGURGUUAGUTRGUAUARGTTGTRGATGUUUAGUAUR |
| | GRGUURGURGRGURGUUUUUTGRGURGAAGRGTURGGUXGURGUAGGGTAGGGUT |
| | UAGRGRGUAGUAGUTGRGRGATUAGTTRGGAUAURGGUTGUUURGGGAAGAGGTU |
| | TURGURGUTRGUUAUTGURGUUAGRGURGAGUURGGGGGGUTGUURGAGGAGGRG |
| | GUUARGGUAUUAGGUAGRGAGTGU |
| 354 | GUAUTRGUTGUUTGGTGURGTGGURGUUTUUTRGGGUAGUUUUURGGGUTRGGRGU |
| | TGGRGGUAGTGGRGAGRGGRGGAGAUUTUTTUURGGGGUAGURGGTGTURGAAUTG |
| | ATRGRGUAGUTGUTGRGRGUTGAGUUUTAUUUTGRGGXGGURGGARGUTTRGGRGU |
| | AGGGGGRGGRGRGGRGGGRGRGGTGUTGGGUATRGAUAARGTGTGRGAGUTGGRGG |
| | RGRGGUTGUTUTTUAGUAURGTGGAGTGGGRGRGUUARGRGUUUTTUTTUUURGAG |
| | UTGURGGTGGURGAUUAGGT |
| 355 | TGGUAGAGATAUAAATTUUTGATGGUAGAGGAGGGAGAGAGAGTGTGGGTGARGA |
| | TGAUAATTGAAUTGAGAUUUAAAGGAGGTAGGGGAGAUATATGGGRGTUTUTGGG |
| | AAGATGGTUUURGGGAAAGUAUAGUUTTTAGAUAGGUUUXGAGGUAGGAGUUTGT |
| | UTGAUTUAURGGAGGAGUTTGGAGGAGGUTGAGGTGGUUTAAGTRGATTAAGUAGG |
| | GTGGGGAGGGAAGAGGRGATGGTGURGTGAGAUUAAGUAGGGUUTTGAGGTUTGG |
| | GGGGAGAAUTTTGGUTTTTAUTUT |
| 356 | GAGTAAAAGUUAAAGTTUTUUUUUUAGAUUTUAAGGUUUTGUTTGGTUTUARGGU |
| | AUUATRGUUTUTTUUUUUUUUAUUUTGUTTAATRGAUTTAGGUUAUUTUATGGTT |
| | TUUAAGUTUUTURGGTGAGTUAGAUAGGUTUUTGUUTXGGGGUUTGTUTAAAGGUT |
| | GTGUTTTUURGGGGAUUATUTTUUAGAGARGUUUATATGTUTUUUUTAUUTUUTT |
| | TGGGTUTUAGTTUAATTGTUATRGTUAUUUAUAUTUTUTUTUUUTUUTUTGUUATUA |
| | GGAATTTGTATUTUTGUUAG |
| 357 | AGAGGAGGGAGAGAGAGTGTGGGTGARGATGAUAATTGAAUTGAGAUUUAAAGGA |
| | GGTAGGGGAGAUATATGGGRGTUTUTGGGAAGATGGTUUURGGGAAAGUAUAGUU |
| | TTTAGAUAGGUUURGAGGUAGGAGUUTGTUTGAUTUAUXGGAGGAGUTTGGAGGA |
| | GGUTGAGGTGGUUTAAGTRGATTAAGUAGGGTGGGGAGGGAAGAGGRGATGGTGU |
| | RGTGAGAUUAAGUAGGGUUTTGAGGTUTGGGGGGAGAAUTTTGGUTTTTAUTUTGA |
| | GGAAGGTGGGAGUUAUAGAGGUTT |
| 358 | AGUUTUTGTGGUTUUUAUUTTUUTUAUAUTAAAAUUUAAAUTUUUTUUTTTAGGAUU |
| | TUAAGGUUUTGUTTGGTUTUARGGUAUUATRGUUTUTTUUUTUUUUAUUUTGUTTA |
| | ATRGAUTTAGGUUAUUTUAGUUTUUTUUAAGUTUUTUXGGTGAGTUAGAUAGGUTU |
| | UTGUUTRGGGGUUTGTUTAAAGGUTGTGUTTTUURGGGGAUUATUTTUUUAGAGAR |
| | GUUUATATGTUTUUUUUAUUTUUTTTGGGTUTUAGTTUAATTGTUATRGTUAUUUAU |
| | AUTUTUTUTUUUTUUTUTG |
| 359 | TGGGRGTUTUTGGGAAGATGGTUUURGGGAAAGUAUAGUUTTTAGAUAGGUUURG |
| | AGGUAGGAGUUTGTUTGAUTUAURGGAGGAGUTTGGAGGAGGUTGAGGTGGUUTA |
| | AGTRGATTAAGUAGGGTGGGGAGGGAAGAGGRGATGGTGUXGTGAGAUUAAGUAG |
| | GGUUTTGAGGTUTGGGGGGAGAAUTTTGGUTTTTAUTUTGAGGAAGGTGGGAGUUA |
| | UAGAGGUTTUTAGAUAGAAGAAGGAUAAGURGGAUTUAGGATAUUAGGGTGGGGG |
| | TATUTGTGGGGGATAAAGGGAGAA |
| 360 | TTUTTUUTTTATUUUUUAUAGATAUUUUUAUUUTGGTATUUTGAGTURGGUTTGTU |
| | UTTUTUTGTUTAGAAGUUTUTGTGGUTUUUAUUTTUUTUAGAGTAAAAGUUAAAG |
| | TTUTUUUUUUAGAUUTUAAGGUUUTGUTTGGTTTUAXGGUAUUATGGUUTUUUUU |
| | TUUUUAUUUTGUTTAATRGAUTTAGGUUAUUTUAGUUTUUTUUAAGUTUUTURGGT |
| | GAGTUAGAUAGGUTUUTGUUTRGGGGUUTGTUTAAAGGUTGTGUTTTUURGGGGAU |
| | UATUTTUUUAGAGARGUUUA |
| 361 | GGUTTTGTGAAAUUAAUUAGGAAGAATGAAAUAUAGAGUTGGTURGAUAUUUAGU |
| | TRGAGGGAGGGGGGURGGAAGUTTUTGGAAGTTGGUTGUUUUTAAGUAGGGGUUA |
| | UTUTAGUUUAUAAGGUUAAGTTGGUAGAGGUAGAXGAGGGGAUTUTGXGGUTUAA |
| | GTUARGGGUUAGGAGUURGUAGUTGURGGGUTGGAAAGGTUAGAGURGGUTUTGR |
| | GTUTGGUTGRGURGGUAAGAAGUUAUAATTARGUAGGUAAAAGAGUURGGGGATT |
| | AGUUUUAGUAUUTGGGAUUUTGAAT |
| 362 | ATTUAGGGTUUUAGGTGUTGGGGUTAATUUURGGGUTUTTTTGUUTGRGTAATTGTG |
| | GUTTUTTGURGGRGUAGUUAGARGUAGAGURGGUTUTGAUUTTTUUAGUURGGUAG |
| | UTGRGGGUTUUTGGUURGTGAUTTGAGUXGUAGAGTUUUUTXGTUTGUUTUTGUUA |
| | AUTTGGUUTTGTGGGUTAGAGTGGUUUUTGUTTAGGGGUAGUUAAUTTUUAGAAGU |
| | TTURGGUUUUUUTUUUTRGAGUTGGGTGTRGGAUUAGUTUTGTGTTTUATTUTTUUT |
| | GGTTGGTTTUAUAAAGUU |
| 363 | AGGUTGAARGGAATTGGGAGUAGAGUUUTGRGGTAGGAUAGAGAUTTRGUAAAGU |
| | URGGAGUAUAUAGUAGUAUUURGTUTTUTAAAGGAUAATTTTGGGAAAAUTUTTGU |
| | UTAATATTUTGGUAUTAAGGATUATTUTGTUAUATUUUXGUTUTGGAUTAUAAGUU |
| | TGUAAGUUUUATURGGGGUAGGGTTTUUTUATTUUTGTGUAURGTGGAAGUUUTGTG |
| | UUTGUUUAGGGUUTGGUAUTTGTARGTAUTTGAAAAUUTRGTGTGGAGTAAAGAGA |
| | GGGGTGATGTGUAAAGGUUTT |
| 364 | AAGGUUTTTGUAUATUAUUUUTUTUTTTAUTUUAUARGAGGTTTTUAAGTARGTAU |
| | AAGTGUUAGGUUUTGGGUAGGUAUAGGGUTTUUARGGTGUAUAGGAATGAGGAGU |
| | UUTGUUURGGATGGGGUTTGUAGGUTTGTAGTUUAGAGXGGGGATGTGAUAGAATG |
| | ATUUTTAGTGUUAGAATATTAGGUAAGAGTTTTUUUAAAATTGTUUTTTAGAAGARG |
| | GGGTGUTGUTGTGTGUTURGGGUTTTGRGAAGTUTUTGTUUTAURGUAGGGUTUTGU |
| | TUUUAATTURGTTUAGUUT |
| 365 | AGUUAGGUTAAAUUAGRGTGTUUUAATGAGGGGUUUTGGGUTGAGTGGAGGAAAT |
| | GGGTGRGGTGGAGGTGGGTTTGGUTGGGUAUAGRGGGUARGTGTGGGTAAGRGGGT |
| | GGGGURGGTTGTGRGGGTGGUUTATUTGGGGUAAGUAGUXGAGGURGAUTGTGTUR |
| | GGRGTGTGGTTGAGUARGGGUAGGTGTUTGGRGGTGAUUUTGUARGTUTGGTGTTT |
| | AUUTGGUUUTGGGTUTGARGTGGGURGRGUUTGGUTGUTGGRGGGAUAGTGTGTTA |
| | TUTGUUTGRGGARGUTTURGG |
| 366 | URGGAAGRGTURGUAGGUAGATAAUAUAUTGTUURGUUAGUAGUUAUURGKUUUU |
| | UARGTUAGAUUUAGGGUUAGGTAAAUAUUAGARGTGUAGGGTUAURGUUAGAUAU |
| | UTGUURGTGUTUAAUUAUARGURGGAUAUAGTRGGUUTXGGUTGUTTGUUUUAGAT |
| | AGGUUAUURGUAUAAURGGUUUUAUURGUTTAUUUAUARGTGUURGUTGTGUUUA |
| | GUUAAAUUUAUUTUUAURGUAUUUATTTUUTUUAUTUAGUUUAGGGUUUUTUATT |
| | GGGAUARGUTGGTTTAGUUTGGUT |
| 367 | UUTTGGUTUAGGTTGGGGAGGGRGTUATGAGTUATGAGGTGGGRGTTGUATTTGTU |
| | AGTTGTGUAGURGRGUAUUAURGAGTAGTUTGGRGGUAGRGRGTURGRGTTRGATT |
| | GRGTUTGGUURGUAGGAGGUURGGTUUAGUAGUUUTTUXGUAUUAGGGTUAURGG |
| | RGRGRGATAUUUTGGGGGRGGGATRGGGGUTRGTGUTUTGUTTUURGAAAUUUTTU |
| | TUUUTUUAGTUTUAGRGTTUTTUUTUUTUUUTUTATIUTTTUAUTTTGGAGTTAUT |
| | TUUTUUUUTUUUTUUTTUUU |
| 368 | GGGAAGGAGGGAGGGGAGGAGGTGTAGGTGAAAGTGAAAGGATAGAGGGAGGAGG |
| | AAGAARGUTGAGAUTGGAGGGAGAAGGGTTTRGGGAAGUAGAGUARGAGUUURGA |
| | TUURGUUUUUAGGGTATRGRGRGURGGTGAUUUTGGTGXGGAAGGGUTGUTGGAUR |
| | GGGUUTUUTGRGGGUUAGARGUAATRGAARGRGGARGRGUTUURGUUAUAUTAUT |
| | RGGTGGTGRGRGGUTGUAUAAUTGAUAAATGUAARGUUUAUUTUATGAUTUATGAR |
| | GUUUTUUUUAAUUTGAGUUAAGG |
| 369 | UAGGUTGGAGTGUAATGGRGRGATUTRGGUTUAUTGUAAUTTUTGUUTUTRGGGTT |
| | UAAGUAATTUTTUTAUUTTAGUUTUUTGAGTAGUTGGGATTAUAGGTAUUTGURGU |
| | UATGUURGGUTAATTTTTTAATTTGTTTTTAGTAGAGAXGGGGTTTUAUUATGTTGG |
| | UUAGGURGGTUTAUAAUTUUTGATUTUAGGTGATUTAUURGUUTRGGUUTUUUAAA |
| | TTAUAGGTGTTATUATTAGGATTUTTGGUAGAUAGGAGTGTTGTAGGGGATGGAAGT |
| | GGATAGTAGGAGGUTUTG |
| 370 | UAGAGUUTUUTAUTATUUAUTTUUATUUUUTAUAAUAUTUUTGTUTGUUAAGAATU |
| | UTAATGATAAUAUUTGTAATTTGGGAGGURGAGGRGGGTAGATUAUUTGAGATUAG |
| | GAGTTGTAGAURGGUUTGGUUAAUATGGTGAAAUUUXGTUTUTAUTAAAAAUAAAT |
| | TAAAAAATTAGURGGGUATGGRGGUAGGTAUUTGTAATUUUAGUTAUTUAGGAGGU |
| | TAAGGTAGAAGAATTGUTTGAAUURGAGAGGUAGAAGTTGUAGTGAGURGAGATRG |
| | RGUUATTGUAUTUUAGUUTG |
| 371 | TGAATGAUUTGGGUAGUATTTUTUUAUUTGRGUTTGUATTTGUTAGAUAGTUTGTGA |
| | UTUTUTGTGGGAGAAAAUAUAAGAAAURGGUUUUTUTGUTGGTTUUUUAUUTGGU |
| | UTGGUTUTUUTGTTUTUUAUUUTGUAUAUTUATGUUTXGGAAUUTGUTTUTUUTUT |
| | GAGUTUUUTUAUAGTGGUURGGUUUARGTGGUUTTTAATUTGUUUAUATUAGAGU |
| | UTUUAUUTURGGUUTATGGUUUATUAGAGGUAGUTGGAGURGGGUATUUTUUUUA |
| | RGTGGGUUTTTGAGGATGGGA |
| 372 | TUUUATUUTUAAAGGUUUARGTGGGGAGGATGUURGGUTUUAGUTGUUTUTGATGG |
| | GUUATAGGURGGAGGTGGAGGUTUTGATGTGGGUAGATTAAAGGUUARGTGGGUR |
| | GGGUUAUTGTGAGGGAGGUTUAGAGGAGAAGUAGGTTUXGAGGUATGAGTGTGUA |
| | GGGTGGAGAAUAGGAGAGUUAGGUUAGGTGGGGAAUUAGUAGAGGGGURGGTTTU |
| | TTGTGTTTTUTUUUAUAGAGAGTUAUAGAUTGTUTAGUAAATGUAAGRGUAGGTGG |
| | AGAAATGUTGUUUAGGTUATTUA |
| 373 | GGGRGGGGUUTGTGRGGTUTGRGGRGRGGAGURGAGTGGGUTGRGGGGATGRGGGG |
| | GAUUAGUTGRGTGGGRGGRGGRGURGAGAGUUURGGAGGRGRGGGGUTGAGRGAG |
| | GGUURGRGGGGGRGUTGGUTGRGUTTGGUTURGGTATGXGUUTAUTTUUTUTGRGT |
| | UTXGUTAGUTGURGTGUTGUTRGURGTGTAUTARGGTUTUATUTGGGTAUUUARGR |
| | GGTUTUURGRGGUAUURGURGGUUUAUAGUUUAGRGRGURGTUUUUTURGTGTGUT |
| | GTTURGUTTRGGGRGTGURGUUT |
| 374 | AGGRGGUARGUURGGGRGGGUAGUAUARGGAGGGGARUUKUKGUTUUUUTUTUUU |
| | URGGRGGGTGURGRGGGAGAURGRGTGGGTAUUUAGATGAGAURGTAGTAUARGG |
| | RGAGUAGUARGGUAGUTAGXGAGARGUAGAGGAAGTAGGXGUATAURGGAGUUAA |
| | GRGUAGUUAGRGUUUURGRGGGUUUTRGUTUAGUUURGRGUUTURGGGGUTUTRG |
| | GRGURGURGUUUARGUAGUTGGTUUUURGUATUUURGUAGUUUAUTRGGUTURGR |
| | GURGUAGAURGUAUAGGUUURGUUU |
| 375 | AAGTGTATTTTUAAGGTATGAGGGGUUUAGAGGAUAUTGTUUUAAAAGUAGTGGTT |
| | GTGAGAGTGGUTTTGGAGTUAGGUTGAUAGTUTGGAAAUTTUUAGGTURGUTUTGA |
| | AGTGURGGUTGUATGAUUAGUUUTUUAGUUTGTGTUXGUTTRGGUUTTUTTTGTGU |
| | AAGTGAGAGUATTGUTGATUUUUURGGGGTGGRGAGGGGGRGUARGTUAGTGAUUT |
| | RGUATGGTGUUTGUUAGGUARGTGGTURGTGTTTUATGATTUTTTGAGAGUTTTGGA |
| | GUAGUTUUAAGAAGAUTUT |
| 376 | GAGTUTTUTTGGAGUTGUTUUAAAGUTUTUAAAGAATUATGAAAUARGGAUUARGT |
| | GUUTGGUAGGUAUUATGRGAGGTUAUTGARGTGRGUUUUUTRGUUAUUURGGGGG |
| | GATUAGUAATGUTUTUAUTTGUAUAAAGAAGGURGAAGXGGAUAUAGGUTGGAGG |
| | GUTGGTUATGUAGURGGUAUTTUAGAGRGGAUUTGGAAGTTTUUAGAUTGTUAGUU |
| | TGAUTUUAAAGUUAUTUTUAUAAUUAUTGUTTTTGGGAUAGTGTUUTUTGGGUUUU |
| | TUATAUUTTGAAAATAUAUTTT |
| 377 | TAATTTTAAAUAAAAUTTTUUATGAGUAAUTAAATATTTAAAATGTGTTTTTUUATA |
| | AAAGTGAATUAGUTUAGTTUTGUAGGUTGAAAATAUAAUAAGGAGGATURGGGTTG |
| | UAGAAAGUAGAGGGUUAUUTAGAURGTGTUTGAGAGAXGGGGAGAAAGUAGUTGT |
| | UTGUTGTGUAUUAGAGGUUTUTAGGGAUUURGGUAGUAAUUURGTGGRGGGUUAU |
| | AUTTGGGAGUTGATTTGTTTTUAGAAUUAUUAGUTAAGUUAUATGAGUUAGGAGUU |
| | TGGTTATUUATTUAAAGUUUA |
| 378 | TGGGUTTTGAATGGATAAUUAGGUTUUTGGUTUATGTGGUTTAGUTGGTGGTTUTGA |
| | AAAUAAATUAGUTUUUAAGTGTGGUURGUUARGGGGTTGUTGURGGGGTUUUTAG |
| | AGGUUTUTGGTGUAUAGUAGAUAGUTGUTTTUTUUUXGTUTUTUAGAUARGGTUTA |
| | GGTGGUUUTUTGUTTTUTGUAAUURGGATUUTUUTTGTTGTATTTTUAGUUTGUAGA |
| | AUTGAGUTGATTUAUTTTTATGGAAAAAUAUATTTTAAATATTrAGTTGUTUATGGA |
| | GAGTTTTGTTTAAAATTA |
| 379 | GUUTUUAGAUURGAAATUUUUUAUTGAAGUUATTUUUAGGAGGAGGGGUUTUAUT |
| | GGGGUUTUAAGGUAGUATUAGUATTTURGGTGAUAGGUAUAGUAATTTATUAGUTU |
| | AUTGGUTUTUTAUTGAGAAUAAGGUAAGURGGGGUUTGUXGAGGGTATGAUAGGU |
| | AGGGAGTGATGGGUURGGUUUAGGGUAGGAGGGAGAUAGAAATGGGUAGGAAGA |
| | GGAGGUTGTUUUUAGUAGUAUTTUTGAGAGGAGGAGUAUUTTTRGGGGAUAUTUT |
| | GGARGGUAUUUUUAAGUAUAGUUUU |
| 380 | GGGGUTGTGUTTGGGGGTGURGTUUAGAGTGTUUURGAAAGGTGUTUUTUUTUTUA |
| | GAAGTGUTGUTGGGGAUAGUUTUUTUTTUUTGUUUATTTUTGTUTUUUTUUTGUUU |
| | TGGGURGGGUUUATUAUTUUUTGUUTGTUATAUUUTXGGUAGGUUURGGUTTGUUT |
| | TGTTUTUAGTAGAGAGUUAGTGAGUTGATAAATTGUTGTGUUTGTUAURGGAAATG |
| | UTGATGUTGUUTTGAGGUUUUAGTGAGGUUUUTUUTUUTGGGAATGGUTTUAGTGG |
| | GGGATTTRGGGTUTGGAGGU |
| 381 | TGAGAGUAGUUAGAUARGTAGTGATUAGGGAAAGTRGAAAGTGUAGATGGGTTRG |
| | UAAARGTGGAUTUTUTAGTTTTGGGTUTGUAGATGGGGURGGUUAUUAXGTGUTUT |
| | UTGAGTTUTUTTTUUAAGTAUAGATUUUTURGGAGARGGAAUATTGTTURGUUTTTA |
| | ATTUTTUUUAGGAGUTGRGGAGGAAGGXGTGAGAAURGGAGUURGGGGTGAUTTGR |
| | GGGGGAGGGGATRGUTTUUURGTRGUUUAUAUUTGUUTAAUUUARGUUUARGGRG |
| | GURGUAAAGGRGAUAURGRGT |
| 382 | ARGRGGTGTRGUUTTTGRGGURGURGTGGGRGTGGGTTAGGUAGGTGTGGGRGARG |
| | GGGAAGRGATUUUUTUUUURGUAAGTUAUUURGGGUTURGGTTUTUAXGUUTTUUT |
| | URGUAGUTUUTGGGAAGAATTAAAGGRGGAAUAATGTTURGTUTURGGAGGGATUT |
| | GTAUTTGGAAAGAGAAUTUAGAGAGUAXGTGGTGGURGGUUUUATUTGUAGAUUU |
| | AAAAUTAGAGAGTUUARGTTTGRGAAUUUATUTGUAUTTTRGAUTTTUUUTGATUA |
| | UTARGTGTUTGGUTGUTUTUA |
| 383 | AUAAGRGGTTGGATTTRGAGAGGAUATUAAGAGUARGTUAAGAGUARGTUAAGAG |
| | UAUARGGAUAGGUAUTGGUARGURGGUAGGTUATTGAURGGUAGAAUAGAGTTTG |
| | GUUAGGGUTGTUAGAGAAGAGTRGGGURGUUAAGUAGUUXGAUTTUUAGRGGAAA |
| | AUUATUTGUUTTUTGGUTUUTUUATUTGUTGAGAGUTAUTTUUAUTUAATAAAAUU |
| | TTGUAUTUATTUTUUAAAUUUAUATGAGATUUAATTUTTURGGTAUAUUAAGGUAG |
| | GAAUUURGAGATAUAGAAAGUUU |
| 384 | GGGUTTUTGTATUTRGGGGTTUUTGUUTTGGTGTAURGGAAGAATTGGATUTUATG |
| | TGGGTITGGAGAATGAGTGUAAGGTTTTATTGAGTGGAAGTAGUTUTUAGUAGATG |
| | GAGGAGUUAGAAGGUAGATGGTTTTURGUTGGAAGTXGGGUTGUTTGGRGGUURGA |
| | UTUTTUTUTGAUAGUUUTGGUUAAAUTUTGTTUTGURGGTUAATGAUUTGURGGRG |
| | TGUUAGTGUUTGTURGTGTGUTUTTGARGTGUTUTTGARGTGUTUTTGATGTUUTUT |
| | RGAAATUUAAURGUTTGT |
| 385 | AUTTGAAGTUAGGAGTTRGTGAAUAGUUTGGUUAAUATGGTGAAAUUUTGTUTUTA |
| | UTAAAAAAAGAAAAATTAGURGGGTGTGGTGGGRGUUTGTAAUUUUAGUAUTTTGG |
| | GAGGUTGAGGTGGGTGGATUAUTTGAAGTUAGGAGTTXGTGAAUAGUUTGATUAAU |
| | ATGGTGAAAUUUTGTUTUTAUTAAAAAUAUAAAAATTAGURGGGTGTGGTGGTGGG |
| | TGUUTGTAATUUUAGUTAUTUAGGAGAUTGAGGUAGGAGGATUAUTTGAAURGGG |
| | GAGGUAGAGGTTGUAGAGAGT |
| 386 | UTUTUTGUAAUUTUTGUUTUUURGGTTUAAGTGATUUTUUTGUUTUAGTUTUUTGA |
| | GTAGUTGGGATTAUAGGUAUUUAUUAUUAUAUURGGUTAATTTTTGTGTTTTTAGTA |
| | GAGAUAGGGTTTUAUUATGTTGATUAGGUTGTTUAXGAAUTUUTGAUTTUAAGTGA |
| | TUUAUUUAUUTUAGUUTUUUAAAGTGUTGGGGTTAUAGGRGUUUAUUAUAUURGG |
| | UTAATTTTTUTTTTTTTAGTAGAGAUAGGGTTTUAUUATGTTGGUUGUTTAAA |
| | GAAUTUUTGAUTTUAAGTG |
| 387 | AAATUTTTTTUUTGUUTGUATTTTUTTAUATAAAGUAATUTAUTAUTGUUATRGGTT |
| | UATTUAUTUAURGGAAUUTGTUTTGUUAGGAUUTGAUUTUAGUAGAUTGAGTUATA |
| | UUAGUATUATUUTTGTTGGGGUUUAGGTUTGUATUUXGUTTURGGUUUUAGUUUUA |
| | UTGTTAGUTUUATUAGGTUUTUTGGGGUAUAUUAAGGAGGURGTTTTUTLTUUUTTT |
| | TTUTGAATTAGATUUUUAGAAAUAAGAUATUAGGUTTUUTGGGGAAATUTAATTTT |
| | GUTUATGAATTTGAUUAT |
| 388 | ATGGTUAAATTUATGAGUAAAATTAGATTTUUUUAGGAAGUUTGATGTUTTGTTTUT |
| | GGGGATUTAATTUAGAAAAAGGGAGAGAAAARGGUUTUUTTGGTGTGUUUUAGAG |
| | GAUUTGATGGAGUTAAUAGTGGGGUTGGGGURGGAAGXGGGATGUAGAUUTGGGU |
| | UUUAAUAAGGATGATGUTGGTATGAUTUAGTUTGUTGAGGTUAGGTUUTGGUAAGA |
| | UAGGTTURGGTGAGTGAATGAAURGATGGUAGTAGTAGATTGUTTTATGTAAGAAA |
| | ATGUAGGUAGGAAAAAGATTT |
| 389 | UAAGGTUUAGGTUUUAGUUTUUUUAURGURGUURGRGUUUTUUTAGGUUTRGGAG |
| | RGGRGUTTTTUTGRGGUUTRGAAGGTGGGGTGGGAAAGTTTGGGGAGTUURGGUTU |
| | TUAUAGUUTGTRGTGAGAAUTGUUUURGGGGAATTRGTUXGURGTARGGAAAAAUT |
| | GGURGGAGUAGAGTRGTURGRGGTTURGRGGTRGRGGGTGGAAGGTGAAGGTRGAG |
| | GGAGGTUAGGUTGUTTUTGRGTGTUUTGARGGUTGGRGTGTTUTUTTGAGATGGGUT |
| | RGGGUTAUTTGGUUAGUTTU |
| 390 | GAAGUTGGUUAAGTAGUURGAGUUUATUTUAAGAGAAUARGUUAGURGTUAGGAU |
| | ARGUAGAAGUAGUUTGAUUTUUUTRGAUUTTUAUUTTUUAUURGRGAURGRGGAA |
| | URGRGGARGALTUTGUTURGGUUAGTTTTTURGTARGGXGGARGAATTUUURGGGG |
| | GUAGTTUTUARGAUAGGUTGTGAGAGURGGGAUTUUUUAAAUTTTUUUAUUUUAU |
| | UTTRGAGGURGUAGAAAGGRGURGUTURGAGGUUTAGGAGGGRGRGGGRGGRGGT |
| | GGGGAGGUTGGGAUUTGGAUUTTG |
| 391 | URGAGGGAGUUAGGUUAUAGUTGAUAGGAAGGUAGAAGGTGGUAGGAGGGGAGG |
| | TTGRGUTGUAUUTUTGGGTTGUUUAGGUUAAUUTGUUAGGUAGGAGGGGGAAGUU |
| | RGTGUUUAUTTTAUUATGAURGGGAAGATGATGGUAGUUAUXGTGGATTTGAGGAT |
| | UUAGAGUAURGUUAGGUAGAGGATUTGUAUUAGGGTGAAGAGGTGGATURGGRGU |
| | AGRGGUARGTGURGUAGGAAGGUATGGTURGGUTGGTGUTTGGUTGGUATUAGGAA |
| | GAGUTTGUAGRGTTUUUAGAAUTA |
| 392 | TAGTTUTGGGAARGUTGUAAGUTUTTUUTGATGUUAGUUAAGUAUUAGURGGAUUA |
| | TGUUTTUUTGRGGUARGTGURGUTGRGURGGATUUAUUTUTTUAUUUTGGTGUAGA |
| | TUTTTUTGUUTGGRGGTGUTUTGGATUUTUAAATUUAXGGTGGUTGUUATUATUTTU |
| | URGGTUATGGTAAAGTGGGUARGGGUTTUUUUUTUUTGUUTGGUAGGTTGGUUTGG |
| | GUAAUUUAGAGGTGUAGRGUAAUUTUUUUTUUTGUUAUUTTUTGUUTTUUTGTUAG |
| | UTGTGGUUTGGUTUUUTRGG |
| 393 | AAATTAUURGGGRGTGGTGGTGGGTGUUTGTAATUUUAGUTAUTUAGGAGGURGAG |
| | GUAGGAGAAURGUTTGAAUURGGGAGGUAGAGUATAGGTTGTTGGAGGGTTGAAG |
| | GTGUAUUUAGUAGAGAUTGGUATAUAGGAGGTUUTGUAAXGGUUUUAGGAAAUUT |
| | UTGGGTUUAGTAAGAGUTTUAGUAGGAGGTAGAAUUATAURGGGUAGGAGTGUUT |
| | GGAAAGGUTTUAAGGUAAUTUUUTUUAAAGTLTTrGGUUUAAUUUTAUAUTGTUAG |
| | GUTGTTAAAGGUUATTTAAAAGUT |
| 394 | AGUTTTTAAATGGUUTTTAAUAGUUTGAUAGTGTAGGGTTGGGUUAGGAUTTTGGA |
| | GGGAGTTGUUTTGAAGUUTTTUUAGGUAUTUUTGUURGGTATGGTTUTAUUTUUTG |
| | UTGAAGUTUTTAUTGGAUUUAGAGGTTTUUTGGGGUXGTTGUAGGAUUTUUTGTAT |
| | GUUAGTUTUTGUTGGGTGUAUUTTUAAUUUTUUAAUAAUUTATGUTUTGUUTUURG |
| | GGTTUAAGRGGTTUTUUTGUUTRGGUUTUUTGAGTAGUTGGGATTAUAGGUAUUUA |
| | UUAUUARGUURGGGTAATTT |
| 395 | AGGAAAAAAUAGUAGUUUAAGAATRGGGUUTUUUTGTTAUAGUAGGAGTRGUATU |
| | TATTTATATATGTTATGTUTTATTGUTUAGUAAUUAGUTUTRGGURGGGGRGTGGGU |
| | RGGGAAGAGGGGTUTUUTGGTGUAGXGGGTTGGRGTGAUTUATUAURGURGXGUAU |
| | TUTGGUUTUTGGGUUTAGGTTAAUAGAUTUURGGGTTTUAGGUTGGGUUUAGGRGG |
| | UUAGGUUUTUUUTGUTGAGGAATUTGGGTTGGGGUAGTGUUAGUTUUUTGUTTUTU |
| | AUUTGGUUAUAGAAGGGGTA |
| 396 | TAUUUUTTUTGTGGUUAGGTGAGAAGUAGGGAGUTGGUAUTGUUUUAAUUUAGAT |
| | TUUTUAGUAGGGAGGGUUTGGURGUUTGGGUUUAGUUTGAAAUURGGGAGTUTGT |
| | TAAUUTAGGUUUAGAGGUUAGAGTGXGRGGRGGTGATGAGTUARGUUAAUUXGUT |
| | GUAUUAGGAGAUUUUTUTTUURGGUUUARGUUURGGURGAGAGUTGGTTGUTGAG |
| | UAATAAGAUATAAUATATATAAATAGATGRGAUTUUTGUTGTAAUAGGGAGGUURG |
| | ATTUTTGGGUTGUTGTTTTTTUUT |
| 397 | AUUUAGGAATTUTTTTUUTTTTTTTTGAGARGGRGTUTUTGTRGUUUAGGUTGGAG |
| | TGUAGTGGRGUAGTUTRGUUTAAUTGUAAGUTURGUUUURGGGTTUATGUUATTUT |
| | UUTGUUTUAGUUTUTTGAGTAGUTGGAAUTAUAGGXGUUTGUUAUUAUAUURGGU |
| | UAATTTTTTGTATTTTTAGTAGAGARGGGGTTTUAURGTGTTAGUTAGGATGGTUTR |
| | GATUTUUTGAUUTRGTGATUUAUUUAUUTUAGUUTUTUAAAGTGUTGGGATTAUAG |
| | GUTTGAAUUAUTGRGUUU |
| 398 | GGGRGUAGTGGTTUAAGUUTGTAATUUUAGUAUTTTGAGAGGUTGAGGTGGGTGGA |
| | TUARGAGGTUAGGAGATRGAGAUUATUUTGGUTAAUARGGTGAAAUUURGTUTUTA |
| | UTAAAAATAUAAAAAATTGGURGGGTGTGGTGGUAGGXGUUTGTAGTTUUAGUTAU |
| | TUAAGAGGUTGAGGUAGGAGAATGGUATGAAUURGGGGGRGGAGUTTGUAGTTAG |
| | GRGAGAUTGRGUUAUTGUAUTUUAGUUTGGGRGAUAGAGARGURGTUTUAAAAAA |
| | AAAAAAAAAAGAATUUTGGGT |
| 399 | AAATAUAGUAGGAGAGAATTUUTUTGAGAUUTAAGATAURGTGUUUTTUUUUUTTG |
| | GUUTUTUAGUTGUTGURGAGTUUTGGAGAAAATRGGGUATUTGAAUAGAGGURGTG |
| | TTTGTUUUTGUTURGGUUTTGTGTTUTUATTUUTGUUAXGUUATUATGGATAATGAA |
| | AGTTGAUTGGUTGURGGGGTTTUUTTTUTUTUTGUUUUTGTUATTTUUATTTGUUAG |
| | GTUTUATGUUTTTTTTGUAUAGAGTTGTTGTGUTTGGGUTUTAATTTGUUAGGUAGT |
| | GATAAATTUUAAGAAAA |
| 400 | TTTTUTTGGAATTTATUAUTGUUTGGUAAATTAGAGUUUAAGUAUAAUAAUTUTGT |
| | GUAAAAAAGGUATGAGAUUTGGUAAATGGAAATGAUAGGGGUAGAGAGAAAGGA |
| | AAUUURGGUAGUUAGTUAAUTTTUATTATUUATGATGGXGTGGUAGGAATGAGAAU |
| | AUAAGGURGGAGUAGGGAUAAAUARGGUUTUTGTTUAGATGUURGATTTTUTUUAG |
| | GAUTRGGUAGUAGUTGAGAGGUUAAGGGGGAAGGGUARGGTATUTTAGGTUTUAG |
| | AGGAATTUTUTUUTGUTGTATTT |
| 401 | GUUUTGAGAUAUTAAATGGRGGGGGGGTGGGGGGAGGAAAGGGAAGGRGGUAGAG |
| | UTUUURGAGURGGGAUAGTUAUTTAUTUTAUAGGUAGTGGGGUURGAUAUAGAUA |
| | GRGURGUUUURGUUAGUUAGUUTRGUARGUUUTRGGAAGXGUAGGUTUURGGRGU |
| | TGRGUTGGAGGGTTUUURGGUAUUUUAGUUTUURGTUUUUAGUURGUTGUAUUTU |
| | RGGGUUUUUUTTAUUUTTGAGAGGUAURGGGAGTTGTRGRGGGGGGGUUTRGGGA |
| | AATTUUURGGAUUUUTGTGUUAGGA |
| 402 | TUUTGGUAUAGGGGTURGGGGAATTTUURGAGGUUUUUURGRGAUAAUTUURGGT |
| | GUUTUTUAAGGGTAAGGGGGGUURGGAGGTGUAGRGGGUTGGGGARGGGAGGUTG |
| | GGGTGURGGGGAAUUUTUUAGRGUAGRGURGGGAGUUTGXGUTTURGAGGGRGTG |
| | RGAGGUTGGUTGGRGGGGGRGGRGUTGTUTGTGTRGGGUUUUAUTGUUTGTAGAGT |
| | AAGTGAUTGTUURGGUTRGGGGAGUTUTGURGUUTTUUUTTTUUTUUUTRTAUUUU |
| | UURGUUATTTAGTGTUTUAGGGU |
| 403 | AUUAUAGUAUTGUAGGAGGATGAGUUUUTGUAGGAAGGAATGUTGGUTUTUTGGG |
| | GTAGATAAAGAAGGTTUTGGGGAAGGGAAGGGAGGAAUAGGAAUATGGGUTUUUT |
| | GUUAGGUTGTUUUAGGTURGGGATGUUATRGGUAAGTGGGXGGGGAUAGGUUTGG |
| | GTAGATGAUATGGTAGTGAGTAAGTGGGGAGGUAGGUUAGUAGAGGAGUUAGGUT |
| | UAUUTUUXGUUXGUUUAUUTRGGUUAUAGAURGGGAGGGGTRGGAGUAUTGRGTT |
| | GGGGTTGATGAGUAGARGAUTGUUA |
| 404 | TGGUAGTRGTUTGUTUATUAAUUUUAARGUAGTGUTURGAUUUUTUURGGTUTGTG |
| | GURGAGGTGGGXGGGXGGGAGGTGAGUUTGGUTUUTUTGUTGGUUTGUUTUUUUA |
| | UTTAUTUAUTAUUATGTUATUTAUUUAGGUUTGTUUUXGUUUAUTTGURGATGGUA |
| | TUURGGAUUTGGGAUAGUUTGGUAGGGAGUUUATGTTUUTGTTUUTUUUTTUUUTT |
| | UUUUAGAAUUUUTUTUUATUTAUUUUAGAGAGUUAGUATTUUTTUUTGUAGGGGUTU |
| | ATUUTUUTGUAGTGUTGTGGT |
| 405 | AGGGAAGGGAGGAAUAGGAAUATGGGUTUUUTGUUAGGUTGTUUUAGGTURGGGA |
| | TGUUATRGGUAAGTGGGXGGGGAUAGGUUTGGGTAGATGAUATGGTAGTGAGTAA |
| | GTGGGGAGGUAGGUUAGUAGAGGAGUUAGGUTUAUUTUUXGUUXGUUUAUUTRGG |
| | UUAUAGAURGGGAGGGGTRGGAGUAUTGRGTTGGGGTTGATGAGUAGARGAUTGU |
| | UAGGUAGUUATTUAUAGGAAATGGUAUAGARGUAUATTGTTUUAGUTAUUUUUUA |
| | TUUTUUUTUAGGGGUAAAGTGAATG |
| 406 | ATTUAUTTTGUUUUTGAGGGAGGATGGGGGGTAGUTGGAAUAATGTGRGTUTGTGU |
| | UATTTUUTGTGAATGGUTGUUTGGUAGTRGTUTGUTUATUAAUUUUAARGUAGTGU |
| | TURGAUUUUTUURGGTUTGTGGURGAGGTGGGXGGGXGGGAGGTGAGUUTGGUTU |
| | UTUTGUTGGUUTGUUTUUUUAUTTAUTUAUTAUUATGTUATUTAUUUAGGUUTGTU |
| | UUXGUUUAUTTGURGATGGUATUURGGAUUTGGGAUAGUUTGGUAGGGAGUUUAT |
| | GTTUUTGTTUUTUUUTTUUUTT |
| 407 | GGTTUTAAAUAUAUAAAUUTTTGATGUATUTGGAATTTAUUTTAATUUUTAUUAAT |
| | TTTTATUAATGGUTUAATATTTGGGGGATTTTUATGGTAATTGUAUTGAATGTATTAA |
| | UTGGTUAGGGAGGATTAUATUAAGAUUAURGGUTXGAGAAAUAGUAGTUTGTTUUT |
| | UUAUUUUUARGTUTGUATUUAGGUUUTTUUAUAGAGATUTUATTTUTUUTGUAGAT |
| | GAUTUATTUAGTGTUTAGGAATURGGTGUTUTGTGGUUAUTAURGAGAGTGGGATA |
| | TTTTUUUUUATTTTATT |
| 408 | AATAAAATGGGGGAAAATATUUUAUTUTRGGTAGTGGUUAUAGAGUAURGGATTUU |
| | TAGAUAUTGAATGAGTUATUTGUAGGAGAAATGAGATUTUTGTGGAAGGGUUTGGA |
| | TGUAGARGTGGGGGTGGAGGAAUAGAUTGUTGTTTUTXGAGURGGTGGTUTTGATG |
| | TAATUUTUUUTGAUUAGTTAATAUATTUAGTGUAATTAUUATGAAAATUUUUUAAA |
| | TATTGAGUUATTGATAAAAATTGUTAGGAAATTAAGGTAAATTUUAGATGUATUAA |
| | AGGTTTGTGTGTTTAGAAUU |
| 409 | TTTGGGGGGUAGGGAGGGTTUAGTUUUUTUAGGUUTGGUTGTGTUUUUTGUUUUUU |
| | AUUUAUAATUAGGUUUAGGGTTGGGGGGTGUAUAUUAAGGAGGGGUAGGAAGTGT |
| | UUAAGAAGUAGAAURGGUTUTGTGTUUUUAGTGGXGGXGGGTGTUTGGGGUAGGA |
| | GGAGGUTATUTGATUUUTTUUUUAUTGUUURGGUUATGAUUTUUTUUUTUUUTUUU |
| | TRGUTUUUTUUUTUUTUUUTUUUTUUUTUUUTUUUTUUUTUUTUUUUTTTTUUTU |
| | GGGTAGUUAGUAUUUTGGGUTG |
| 410 | AGUUUAGGGTGUTGGUTAUUUUAGUUATGAAGGAGGAGGGAGGGAGGGAGGGAG |
| | GGAGGGAGGGAGGGAGGGAGRGAGGGAGGGAGGGAGGAGGTUATGGURGGGGUA |
| | GTGGGGAAGGGATUAGATAGUUTUUTUUTGUUUUAGAUAUUXGUXGUUAUTGGGG |
| | AUAUAGAGURGGTTUTGUTTUTTGGAUAUTTUUTGUUUUTUUTTGGTGTGUAUUUU |
| | UUAAUUUTGGGUUTGATTGTGGGTGGGGGGUAGGGGAUAUAGUUAGGUUTGAGGG |
| | GAUTGAAUUUTUUUTGUUUUUUAAAG |
| 411 | UURGUAAGUUTRGUUUUTUUAGGUUTRGUUUTUUUTUUTTGUAGAGAGTGGUUAA |
| | GUTRGTGTTUUAGAGGUTGAATGAGGATTTTGTGRGGAAGUURGAUTATGUTTTGAG |
| | UTUTGTGGGTAAGAUURGGAGAUAUTGGAAGAUAGAGAXGUAGAUAGGAAAGAGG |
| | UUAAGAUAUTGAUAUAGAUAGAUUUATGUAUUTGAURGGURGAAGAUAGAGUUTR |
| | GGAUAGUUUUUAUURGUUUUUAGUUUURGRGUUUURGRGUUURGAUTUURGGUAA |
| | GGUUTGGGAGUUTUTGAGGGTTA |
| 412 | TAAUUUTUAGAGGUTUUUAGGUUTTGURGGGAGTRGGGGRGRGGGGGRGRGGGGG |
| | UTGGGGGRGGGTGGGGGUTGTURGAGGUTUTGTUTTRGGURGGTUAGGTGUATGGG |
| | UUTGTUTGTGTUAGTGTUTTGGUUTUTTTUUTGTUTTGGGTTUUUGTAAGRTTT |
| | URGGGTUTTAUUUAUAGAGUTUAAAGUATAGTRGGGUTTURGUAUAAAATUUTUAT |
| | TUAGUUTUTGGAAUARGAGUTTGGUUAUTUTUTGUAAGGAGGGAGGGRGAGGUUT |
| | GGAGGGGRGAGGUTTGRGGG |
| 413 | UAGATUAGGGTUUTUAGAUTTGTURGGAGGGAGGGUUUTGUATAUUTGUUAARGU |
| | UUTGTTTGUTGGGAAAGGGGUTGATGTTGUAATGAUAGGTTAAAUAGUAAUAGGAU |
| | ATTGAUTGGUATUTGUAAGUTGAGUTUAGUTUAGAGAGGXGAGGAGUAUAGGGGA |
| | GGGAGGAAAATUURGGTGTGGATUTUAUUUAUARGGUUUAUTGGGTGUTUUTGGU |
| | AGARGGAATTATGGGTGUTTTTAUTUTUTUATTTTAAAAATGTGUTTTTTATGTGTAT |
| | TGTAAAAGTAAUAGATTUUUA |
| 414 | TGGGAATUTGTTAUTTTTAUAATAUAUATAAAAAGUAUATTTTTAAAATGAGAGAGT |
| | AAAAGUAUUUATAATTURGTUTGUUAGGAGUAUUUAGTGGGURGTGTGGGTGAGAT |
| | UUAUAURGGGATTTTUUTUUUTUUUUTGTGUTUUTXGUUUTUTGAGUTGAGUTUA |
| | GUTTGUAGATGUUAGTUAATGTUUTGTTGUTGTTTAAUUTGTUATTGUAAUATUAGU |
| | UUUTTTUUUAGUAAAUAGGGRGTTGGUAGGTATGUAGGGUUUTUUUTURGGAUAA |
| | GTUTGAGGAUUUTGATUTG |
| 415 | UAUTTGGUTUTRGTGGUTGGGAUAGATTGUTTUUTTUUTUTUTUUTGGGTGUUAGGT |
| | AGGUUUAGAAAUUAUUTGATGTUAGUAAGGUUTGGUUAUUUAUTGGTGGGGAGGA |
| | AGTGGGRGGGTGUUUAGGGAUAGATGAGURGGGUAGAXGTGUUUTGAGGUAGUAU |
| | AGTUAGGGUTGARGTGGGUATTATGUAUUTRGGGGUTTTUAGAGUTGGUTURGGTU |
| | URGTTTGUUUAUATUAAGUAGGTUAGAGTGGAGAGGGUUAGGGGRGUTGGGGTUA |
| | AGGUATGUAUTGAUUAGGRGTU |
| 416 | GARGUUTGGTUAGTGUATGUUTTGAUUUUAGRGUUUUTGGUUUTUTUUAUTUTGAU |
| | UTGUTTGATGTGGGUAAARGGGAURGGAGUUAGUTUTGAAAGUUURGAGGTGUAT |
| | AATGUUUARGTUAGUUUTGAUTGTGUTGUUTUAGGGUAXGTUTGUURGGUTUATUT |
| | GTUUUTGGGUAUURGUUUAUTTUUTUUUUAUUAGTGGGTGGUUAGGUUTTGUTGA |
| | UATUAGGTGGTTTUTGGGUUTAUUTGGUAUUUAGGAGAGAGGAAGGAAGUAATUT |
| | GTUUUAGUUARGAGAGUUAAGTG |
| 417 | AUUAUAUTTGAAUATAUAGAUATUUTTTTUUAGGGTGTGTTGTGUTRGATAUUTTT |
| | AATTUUTGTUTGUATTUUAGGGUUTGUUUAGUUTUTTUUTGGUTUUUUAGUUUAGU |
| | UTGGTUUTTURGGUUTUUUTGTUATUUUUAUUTUTXGTGTGTGUAUAAGUAGGGAU |
| | UAGGTAGGGAGAURGGUAGATGUTGUTUTUTGTUUUTGGGGTTTUTTTTUTTAGTGT |
| | TGUTUUUAUAUUUARGRGATGUTTTAATTAAUTGUUAUAUTUAGGUTTTUTUAGTG |
| | GGGAGAGTUAGAAATAGA |
| 418 | UTATTTUTGAUTUTUUUUAUTGAGAAAGUUTGAGTGTGGUAGTTAATTAAAGUATR |
| | GRGTGGGTGTGGGAGUAAUAUTAAGAAAAGAAAUUUUAGGGAUAGAGAGUAGUAT |
| | UTGURGGTUTUUUTAUUTGGTUUUTGUTTGTGUAUAUAXGAGAGGTGGGGATGAUA |
| | GGGAGGURGGAAGGAUUAGGUTGGGUTGGGGAGUUAGGAAGAGGUTGGGUAGGU |
| | UUTGGAATGUAGAUAGGAATTAAAGGTATRGAGUAUAAUAUAUUUTGGAAAAGGA |
| | TGTUTGTATGTTUAAGTGTGGATG |
| 419 | TUUUAGUUAUTURGUAGTUAUTUUTGAUUUAGAAAAGAAUAAUUAUAGUTGGGUU |
| | UAGUAUUURGGGUUAUTUUUTGUAGUTGUUUAUAUATUTGGUAGUTGGGTUUAUT |
| | TATGUAATGTGGATXGGGTTTTUTTAUATUTGAAATUTGXGTUTUTATUUUTUUTUTG |
| | AGAUUAGTGTUTUUTGUUAGUTTUUATGGUUURGGGATGAUUTUAUTUTUUUAGGG |
| | TUTUUUTGRGTUUTGGGAGUTUTGGURGAGGAGUAGUAGGGGUTGATGGUAGAGR |
| | GGGGGUAGGTUAGAGUTUAGUA |
| 420 | GUTGAGUTUTGAUUTGUUUmGUTUTGUUATUAGUUUUTGUTGUTUUTRGGUUAGA |
| | GUTUUUAGGARGUAGGGAGAUUUTGGGAGAGTGAGGTUATUURGGGGUUATGGAA |
| | GUTGGUAGGAGAUAUTGGTUTUAGAGGAGGGATAGAGAXGUAGATTTUAGATGTA |
| | AGAAGUUXGATUUAUATTGUATAAGTGGAUUUAGUTGUUAGATGTGTGGGUAGUT |
| | GUAGGGAGTGGUURGGGGTGUUGGGUUUAGUTGTGGTTGTTUTTTTUTGGGTUAGG |
| | AGTGAUTGRGGAGTGGUTGGGAU |
| 421 | UUAAARGRGGUAUARGGGGARGGUUUUTUURGGGGTUAGGUTUAUTGGUTUUTTU |
| | UUTTUAGRGUUAUUAGGUAGGAGGGUUAARGGTUAUAUAGGAGGUAUUUTUAUUT |
| | GUUTTTGUAUUAGUAAATAAAGTGUATUUUATTTTXGTGTGAGXGTRGGUURGGTG |
| | AGTUAGUUUTTURGGGUUUTTTUUTGTTUTUAGGGUAGGGGGRGTGRGUTGAGUUA |
| | GAGGTAGATUTGUAGAAAGGGUUURGAUTGGGUUTRGGGUAGGGURGGRGUUUAU |
| | UAUAUTUTGGGGGTUAGUTATGU |
| 422 | GUATAGUTGAUUUUUAGAGTGTGGTGGGRGURGGUUUTGUURGAGGUUUAGTRGG |
| | GGUUUTTTUTGUAGATTTTAUUTUTGGUTUAGRGUARGUUUUUTGUUUTGAGAAUAG |
| | GAAAGGGUURGGAAGGGUTGAUTUAURGGGURGAXGUTUAUAXGAAAATGGGATG |
| | UAUTTTATTTGUTGGTGUAAAGGUAGGTGAGGGTGUUTUUTGTGTGAURGTTGGUU |
| | UTUUTGUUTGGTGGRGUTGAAGGGAAGGAGUUAGTGAGUUTGAUUURGGGAGGGG |
| | URGTUUURGTGTGURGRGTTTGG |
| 423 | GUAGGAAGGGUUUAGARGAUAUUUUUAUAGAUATATGUUAGUUUUTURGGGTGAU |
| | UAAAATUATUTUAGTAAAGGUAGATGAGGUUAAGRGAAAAGGGGTGGGTGGAAGA |
| | AURGGUTUTGAGTUTUAGUUUAUAGAUAUTRGGAUAUTXGTRGGUURGGTAGGUA |
| | GGGGTTUUTGGTGGUUTUAGGUTGTUAGGUURGGUUUUUTUURGUAGUTGTUTUUA |
| | GUTUUUAUUTUUUURGUUUAUUUUUUAGGAUTUUTATTTUAUTGAGGAGATTAAG |
| | AUUAUUTGGRGAGAAUUUUTUUUA |
| 424 | GGGAGGGGTTUTRGUUAGGTGGTUTTAATUTUUTUAGTGAAATAGGAGTUUTGGGG |
| | GGTGGGRGGGGGAGGTGGGAGUTGGAGAUAGUTGRGGGAGGGGGURGGGUUTGAU |
| | AGUUTGAGGUUAUUAGGAAUUUUTGUUTAURGGGURGAXGAGTGTURGAGTGTUT |
| | GTGGGUTGAGAUTUAGAGURGGTTUTTUUAUUUAUUUUTTTTRGUTTGGUUTUATU |
| | TGUUTTTAUTGAGATGATTTTGGTUAUURGGAGGGGUTGGUATATGTUTGTGGGGGT |
| | GTRGTUTGGGUUUTTUUTGUT |
| 425 | AGGTGAGATUTGGAGGTTGRGGGGUAGTTAGUAAGTGGGAGAGAGUTGUATGRGGG |
| | GAAGGTGGGAGGRGTTGUAGGAAAGGTGAGGGAGAUAUAGUTGAGUTGTGGTGUT |
| | GGUUAGUTGGGGUUTTGRGUUTTATURGGGUAUTGTGAXGGUUAUTAAUAGGTTTT |
| | AAGTAURGGAATGAUATGATRGGATTTGTAATTTAAUTAGATUUTTUTGAUTGUTGT |
| | TGGGGGAAUAGAUTGTUAAUUTUAUAAUAGUAUTGTUAGUTGAGTATTAGAUAAAT |
| | GATGAAUUTGGGUUUAGGGA |
| 426 | UUUTGGGUUUAGGTTUATUATTTGTUTAATAUTUAGUTGAUAGTGUTGTTGTGAGGT |
| | TGAUAGTUTGTTUUUUUAAUAGUAGTUAGAAGGATUTAGTTAAATTAUAAATURGA |
| | TUATGTUATTURGGTAUTTAAAAUUTGTTAGTGGUXGTUAUAGTGUURGGATAAGG |
| | RGUAAGGUUUUAGUTGGUUAGUAUUAUAGUTUAGUTGTGTUTUUUTUAUUTTTUUT |
| | GUAARGUUTUUUAUUTTUUURGUATGUAGUTUTUTUUUAUTTGUTAAUTGUUURGU |
| | AAUUTUUAGATUTUAUUTG |
| 427 | TGTGTTAUUUUAGAAAGUAAGGARGUTTUUAAAGATGTTUAGAGUAGTGTTUAAAG |
| | GGATGUUUAUTGGTUAGTUUUAAURGUTGTGAAUURGGAAAATUTGAGAUTGGTGT |
| | UAGTTAATTTAGAAAGTTTATTTTGUUAAGGTTGAGGAXGTATGUUTGTGAUAUAGU |
| | UTUAGGAAGTUUTGATGAUATGTGUUUAAGGTGGTTGGGGTGTAGUTTGATTTTATA |
| | UAUTTAGGGAGUATGAGAUATUAATTAAGTAUAUTTGAGAAATAUATRGGTTTGGT |
| | UTAGAAAGGRGGGAUAAU |
| 428 | GTTGTLURGUUTTTUTAGAUUAAAURGATGTATTTUTUAAGTGTAUTTAATTGATGT |
| | UTUATGUTUUUTAAGTGTATAAAATUAAGUTAUAUUUUAAUUAUUTTGGGUAUATG |
| | TUATUAGGAUTTUUTGAGGUTGTGTUAUAGGUATAXGTUUTUAAUUTTGGUAAAAT |
| | AAAUTTTUTAAATTAAUTGAUAUUAGTUTUAGATTTTURGGGTTUAUAGRGGTTGGG |
| | AUTGAUUAGTGGGUATUUUTTTGAAUAUTGUTUTGAAUATUTTTGGAAGRGTUUTT |
| | GUTTTUTGGGGTAAUAUA |
| 429 | TGAGAATAATGTUTGGTATGRGAGGAGUAUUAGUAAATRGTGUTUATUATTUUAGR |
| | GGAGUAAATTGTTGUTGTUTUTUAURGGGUTTTGGGTTAUTGAGGUTGUTATTTATT |
| | AAAGTGTGGGTTGTGAUTUATTAUTAGGTUATGAAATXGGTGTAGTGGTAGUAAUU |
| | AGUUUTTAAAGAAATGAAURGGGGURGGGRGRGGTGGTTUAUAUUTGTAATUUUAG |
| | UAUTTTGGGAGGURGAGGRGGGTGGATUARGAGGTUAAGAGATRGAGAUUATUUTG |
| | GUUAAUATGGTGAAAUURG |
| 430 | RGGGTTTUAUUATGTTGGUUAGGATGGTUTRGATUTUTTGAUUTRGTGATUUAUURG |
| | UUTRGGUUTUUUAAAGTGUTGGGATTAUAGGTGTGAAUUAURGRGUURGGUUURG |
| | GTTUATTTUTTTAAGGGUTGGTTGUTAUUAUTAUAUXGATTTUATGAUUTAGTAATG |
| | AGTUAUAAUUUAUAUTTTAATAAATAGUAGUUTUAGTAAUUUAAAGUURGGTGAG |
| | AGAUAGUAAUAATTTGUTURGUTGGAATGATGAGUARGATTTGUTGGTGLTTUUTRG |
| | UATAUUAGAUATTATTUTUA |
| 431 | AGGATGGAGGURGGGGAGGUAGRGURGURGGRGGGGGRGGGRGGURGRGURGUAG |
| | GRGGUTGGGGUAAGTGGGTGRGGUTUAARGTGGGGGGUARGGTGTTUUTGAUUAUU |
| | RGGUAGARGUTGTGURGRGAGUAGAAGTUUTTUUTUAGUXGUUTGTGUUAGGGGG |
| | AAGAGUTGUAGTRGGAURGGGTGAGGUUUURGGGGTGGGRGGRGAGRGGGRGGTG |
| | GGTUUTURGUTRGUURGARGRGGGGUTGTRGGGUUTGGUTRGUURGUUAGGUTGGG |
| | GAUURGGURGGGTTUATTTURGA |
| 432 | TRGGAAATGAAUURGGURGGGTUUUUAGUUTGGRGGGRGAGUUAGGUURGAUAGU |
| | UURGRGTRGGGRGAGRGGAGGAUUUAURGUURGUTRGURGUUUAUUURGGGGGUU |
| | TUAUURGGTURGAUTGUAGUTUTTUUUUUTGGUAUAGGXGGUTGAGGAAGGAUTTU |
| | TGUTRGRGGUAUAGRGTUTGURGGGTGGTUAGGAAUAURGTGUUUUUUARGTTGAG |
| | URGUAUUUAUTTGUUUUAGURGUUTGRGGRGRGGURGUURGUUUURGURGGRGGR |
| | GUTGUUTUUURGGUUTUUATUUT |
| 433 | TUTAUTGATGRGGAGAURGAGUUUUAGGGUAGUAGAGUUUTAGUTTRGRGUTAUA |
| | RGGUTGTGGGRGUTGRGUUUUAGGGUARGGURGGUUUAGGTRGTGGUUUAUTRGG |
| | GAUURGRGGUTUAURGGTGRGGTTGARGRGGUARGGGAAGXGGTAGGTGUTUAGU |
| | AUUTUUTUUTRGTUUTGUTRGTRGATGAUURGGUAUTGGRGUAGATARGGRGTGAG |
| | UTTGGURGGGTTUAGGGRGRGAGUUAGURGATGURGGARGUUUTRGATTRGUTUUU |
| | AUAGRGRGTUUTUUTURGUUTUA |
| 434 | TGAGGRGGAGGAGGARGRGUTGTGGGAGRGAATRGAGGGRGTURGGUATRGGUTGG |
| | UTRGRGUUUTGAAUURGGUUAAGUTUARGURGTATUTGRGUUAGTGURGGGTUATR |
| | GARGAGUAGGARGAGGAGGAGGTGUTGAGUAUUTAUXGUTTUURGTGURGRGTUA |
| | AURGUAURGGTGAGURGRGGGTUURGAGTGGGUUARGAUUTGGGURGGURGTGUU |
| | UTGGGGRGUAGRGUUUAUAGURGTGTAGRGRGAAGUTAGGGUTUTGUTGUUUTGG |
| | GGUTRGGTUTURGUATUAGTAGA |
| 435 | UTUAUUTTTUUTAGTTTAGAAAATUUUTUAUTGUTTUUUUAATGGAGGUTGUUUUA |
| | GGAGTGGUUUAGTGGGGUUAAUUAGUTGTTUTATGUUAGUAGUTURGGAGTATGTA |
| | UATTTUUAUTUTGGTTUAAAUTTGTTUTTUTATTUAXGGUUUUATTAAGAAA |
| | TUATUTGUAGGUTGGAURGGGTTGGGATGUAGUAAGTTGGTGTGGUTAUTURGAGT |
| | GTGTGAUAUAUUTGUAGGGGUUTGTGAGUAGTGGGAGGGUUAGAUATGTGGATTU |
| | UUAGGGUTGGTGGUTTUUTT |
| 436 | AGGAAGUUAUUAGUUUTGGGAATUUAUATGTUTGGUUUTUUUAUTGUTUAUAGGU |
| | UUUTGUAGGTGTGTUAUAUAUTRGGAGTAGUUAUAUUAAUTTGUTGUATUUUAAU |
| | URGGTUUAGUUTGUAGATGAATGTTnTUTTAATGGGGUXGTGAATAGAAGAAUAA |
| | GTTTGAAUUAGAGTGGAAATGTAUATAUTURGGAGUTGUTGGUATAGAAUAGUTGG |
| | TTGGUUUUAUTGGGUUAUTUUTGGGGUAGUUTUUATTGGGGAAGUAGTGAGGGATT |
| | TTUTAAAUTAGGAAAGGTGAGA |
| 437 | AARGUTGAUATUTTTURGGGTGTUTGAAAAUAGAAUTGGUUTTUUTAAGAAUTAAU |
| | AARGATAUTGTTTTUAGUUARGTTUUTTUUTGTTUTTGUTAUARGUTUTGTUAAAT |
| | AGGTGGUUAGAGGUURGGGTGUAGATGUAGTGGUTUAXGTUAGTAATUUUAGUAU |
| | TUTGGGAGGUTGGTGGGRGGATUAUTTGAGGUUAGGAGTTTAAAGAUUAGUTTGGG |
| | UAAUATGGTGAAAUUUTGTUTUTAUTAAAAATAUAAAAAATTAGURGGGTGTGGTG |
| | GUAUAAAUUTGTAGTTUUAG |
| 438 | UTGGAAUTAUAGGTTTGTGUUAUUAUAUURGGUTAATTTTTTGTATTTTTAGTAGAG |
| | AUAGGGTTTUAUUATGTTGUUUAAGUTGGTUTTTAAAUTUUTGGUUTUAAGTGATU |
| | RGUUUAUUAGUUTUUUAGAGTGUTGGGATTAUTGAXGTGAGUUAUTGUATUTGUA |
| | UURGGGUUTUTGGUUAUUTATTTGAUAGAGRGTGTAGUAAGAAUAGGAAGGGAAR |
| | GTGGUTGAAAAUAGTATRGTTGTTAGTTUTTAGGAAGGUUAGTTUTGTTTTUAGAUA |
| | UURGGAAAGATGTUAGRGTT |
| 439 | GAGGUUUAUUUARGUUUUUAGUTUARGATATUTGUAGAGATGUUAAAUUUTGGUA |
| | GAGGAAUTUAGGUUATGTGUTTUAGUUGUTXUUTUAUTUUTUUAUTUUUTGUURGG |
| | GUUUTGAGUUAGGAGUUAGGUAUAUAGUTGGAUUUATUXGUUAATGUUAUUUAU |
| | UUTTGTGUUUAGUAUURGGUUUARGGUAGGTGUTUAGTGTGUAGGUUUAUATGTA |
| | UTAGGTGUAAGGUAARGAUAUAUUAUAUAGGAUAAGGATGUAAAGUAUUTTUTGG |
| | GUUUTTUTGRGGUTUTGUUTTUUUA |
| 440 | TGGGAAGGUAGAGURGUAGAAGGGUUUAGAAGGTGUTTTGUATUUTTGTUUTGTGT |
| | GGTGTGTRGTTGUUTTGUAUUTAGTAUATGTGGGUUTGUAUAUTGAGUAUUTGURG |
| | TGGGURGGGTGUTGGGUAUAAGGGTGGGTGGUATTGGXGGATGGGTUUAGUTGTGT |
| | GUUTGGUTUUTGGUTUAGGGUURGGGUAGGGAGTGGAGGAGTGAGGGAGUAGUTG |
| | AAGUAUATGGUUTGAGTTUUTUTGUUAGGGTTTGGUATUUTGUAGATATRGTGAG |
| | UTGGGGGRGTGGGTGGGUUTU |
| 441 | GGAGGUAAARGGGAAUURGGUTGGRGGGUTGRGAGURGGTAGGGARGUTGGGGTU |
| | UAGGGUTGUTGGAUAGUUURGUUUTGTAUUTUTUUUUATAATTUUUTGGTGGGT |
| | GTURGAAATAGUUURGGGTAATUUUAGGGRGAGGUAGTXGGGAATTAAUUUUAGU |
| | UTTGAAGTAAGAGAUAGAGGRGTUUAUAGAAGAGGGUTUTGRGRGTUURGGAUTG |
| | GAUAUAGRGUAGAGTUUATTUUAGGGAUAURGUAAUURGUAAGRGAUUUAGGUUR |
| | GUTUUAGGGRGGGATURGRGRGGU |
| 442 | GURGRGRGGATUURGUUUTGGAGRGGGUUTGGGTRGUTTGRGGGTTGRGGTGTUUU |
| | TGGAATGGAUTUTGRGUTGTGTUUAGTURGGGARGRGUAGAGUUUTUTTUTGTGGA |
| | RGUUTUUXGTUTUTTAUTTUAAGGUTGGGGTTAGTTGGAAUUUTTUUTTTUUGUT |
| | TAUURGGGGUTATTTRGGAUUUAGGATTAAGTGAGGGATGGGGAGAGGTAUAGGGR |
| | GGGGUTGTUUAGUAGUUUTGGAUUUUAGRGTUUUTAURGGUTRGUAGUURGUUAG |
| | URGGGTTUURGTTTGUUTUU |
| 443 | UATGTGUTGAGATGGAGAAGGRGUUAGTGTUAGUAUTAGAUAGGUTGAGATGTUA |
| | AGTGGAAATGTUAAGGAGGTGGTGGAGGTGGTGGGAGUTGUAGGGUTGTGAGGUU |
| | RGGGAGAGGGUUAGAGUTGUAGUTTTAAATTGGAGGGTUAXGGUATGTGGAGGUU |
| | AAGGAAGUAGATGGGATGTURGGGGAGAGAGTATGGAUTGAAGUAGUTAAAGAAT |
| | TGUAGUATUTAATGGAUAGGAAGAGGGGUAGRGAUAGRGATGGAGUUTGAGAAGG |
| | AGGGTGUAGTGTUUUUAAGUUATGT |
| 444 | AUATGGUTTGGGGAUAUTGUAUUUTUUTTTTUAGGUTUUATRGUTGTRGUTGUUUU |
| | TUTTUUTGTUUATTAGATGUTGUAATTUTTTAGUTGUTTUAGTUUATAUTUUUTUUU |
| | RGGAUATUUUATUTGUTTUUTTGGUUTUUAUATGUXGTGAUUUTUUAATTTAAAGU |
| | TGUAGUTUTGGUUUUUUURGGGUUTUAUAGUUUTGUAGUTUUUAUUAUUTUUAU |
| | UAUTTUUUUUTGAUATTTUUAUTTGAUATUTUAGUUTGTUTAGTGUTGAUAUTGGRGU |
| | UTTUTUUATUTUAGUAUATG |
| 445 | UUUTUAGGTTTGGTTTUTGTTGURGUTGTTGTTTTUTTTUTUUAAUATUATAAGUUTUT |
| | TUUTTATUTTTUUATGTUTGUAUAUAGGAAGRGGUATUAUTTGTTTTTUATGTUUTG |
| | RGUATRGAGGUAUAUTTTUUGUTUUTUTTTGTGUXGUUAGURGGUUUAGGUUUAUA |
| | GATGGTAGGAUTTGTGUUUUAGGUTGUTGTGTGAGTUAGAGTUAGGUAGGAAGUAA |
| | ATGGUAAUTTUAURGRGGTGAUTGAGGAATGUTTAARGAAGGRGURGUUUTTGAUA |
| | ARGGTGTGGGTTGGTAA |
| 446 | TTAUUAAUUUAUAURGTTGTUAAGGGRGGRGUUTTRGTTAAGUATTUUTUAGTUAU |
| | RGRGGTGAAGTTGUUATTTGUTTUUTGUUTGAUTUTGAUTUAUAUAGUAGUUTGGG |
| | GUAUAAGTUUTAUUATUTGTGGGUUTGGGURGGUTGGXGGUAUAAAGAGGAGUAG |
| | AAAGTGTGUUTRGATGRGUAGGAUATGAAAAAUAAGTGATGURGUTTUUTGTGTGU |
| | AGAUATGGAAAGATAAGGAAGAGGUTTATGATGTTGGAAAAGAAAAUAAUAGRGG |
| | UAAUAGAAAUUAAAUUTGAGGG |
| 447 | TGUTUUTUTTTGTGURGUUAGURGGUUUAGGUUUAUAGATGGTAGGAUTTGTGUUU |
| | UAGGUTGUTGTGTGAGTUAGAGTUAGGUAGGAAGUAAATGGUAAUTTUAURGRGGT |
| | GAUTGAGGAATGUTTAARGAAGGRGURGUUUTTGAUAAXGGTGTGGGTTGGTAAAA |
| | GGAAAUAGURGGGAGUUUTGUAGRGURGGTGURGUUAURGTTTAGTUTGAUTGTGU |
| | ATTTGAUTAAGTUAUAAGAGGUUAGGUUTGTGAUTTGTURGAGGGAAAAAUUAUU |
| | AGAAAAUUAGGTGTUTGGGUT |
| 448 | AGUUUAGAUAUUTGGTTTTUTGGTGGTTTTTUUUTRGGAUAAGTUAUAGGUUTGGU |
| | UTUTTGTGAUTTAGTUAAATGUAUAGTUAGAUTAAARGGTGGRGGUAURGGRGUTG |
| | UAGGGUTUURGGUTGTTTUUTTTTAUUAAUUUAUAUXGTTGTUAAGGGRGGRGUUT |
| | TRGTTAAGUATTUUTUAGTUAURGRGGTGAAGTTGUUATTTGUTTUUTGUUTGAUTU |
| | TGAUTUAUAUAGUAGUUTGGGGUAUAAGTUUTAUUATUTGTGGGUUTGGGURGGU |
| | TGGRGGUAUAAAGAGGAGUA |
| 449 | UTGTGUTUAAGAGUUAUTTUTTAAURGGGGTGGGAGGAAGUAGUTTUAGGAAUTGU |
| | TGAGAGAGUAGAAUTUARGUTUUAGGGUTUAGAGUAGGAGGTAGGGTGTGRGGUA |
| | AGRGUTGGUURGGAUAGAAGUAGAGTGGGUUUTGGTUTXGGGUAGGATGTTTUTGA |
| | UTUAUATTTUUTGAGGAGAGAAAGUTAAGUTUUTGUUTAATGTUTUTGTUTUUUUT |
| | TUUAGAAAAATGUUTUAGUTUTTURGGUUTGAAGGAATGGUUTUUTUmGGGUUUU |
| | ATGATTUTTTUUTGTGTGGG |
| 450 | UUUAUAUAGGAAAGAATUATGGGGUURGGGAGGAGGUUATTUUTTUAGGURGGAA |
| | GAGUTGAGGUATTTTTUTGGAAGGGGAGAUAGAGAUATTAGGUAAAGAGUTTAGUT |
| | TTUTUTUUTUAGGAAATGTGAGTUAGAAAUATUUTGUUXGAGAUUAGGGUUUAUTU |
| | TGUTTUTGTURGGGUUAGRGUTTGURGUAUAUUUTAUUTUUTGUTUTGAGUUUTGG |
| | AGRGTGAGTTUTGUTUUTUAGUAGTTUUTGAAGUTGUTC |
| | AGAAGTGGUTUTTGAGUAUAG |
| 451 | TTTTTTTTTTGAGAUAGAGTUTRGUTUTGTUAUUUAGGUTGGAGTGUAGTGGRGTGA |
| | TUTRGGUTUAUTGUAAGUTUUAUUTTUURGGGTTUATGUUATTUTUUTGUUTUAGUT |
| | TUUTGAGTATUTGGGAUTAUAGGUAUTUAUUAUUAXGUURGGUTAATTTTUURTTTT |
| | TATTTTTAGTGGAGARGGGGTTTUATTGTGTTAGUUAGGATGGTUTRGATUTUUTGA |
| | UUTRGTGATUAGUURGUUTUAGUUTUUUAAAGTGUTGGGATTAUAGGTGTGAGUUA |
| | UUTUAUURGGUUTGUTA |
| 452 | AGUAGGURGGGTGAGGTGGUTUAUAUUTGTAATUUUAGUAUTTTGGGAGGUTGAG |
| | GRGGGUTGATUARGAGGTUAGGAGATRGAGAUUATUUTGGUTAAUAUAGTGAAAU |
| | UURGTUTUUAUTAAAAATAAAAAAAAAAAATTAGURGGGXGTGGTGGTGAGTGUUT |
| | GTAGTUUUAGATAUTUAGGAAGUTGAGGUAGGAGAATGGUATGAAUURGGGAGGT |
| | GGAGUTTGUAGTGAGURGAGATUARGUUAUTGUAUTUUAGUUTGGGTGAUAGAGR |
| | GAGAUTUTGTUTUAAAAAAAAAAU |
| 453 | TTGUUTUTTTTGATTTTTTTUTTTGGGUAGGAGTTAGAATGUAAAATAUAGATTUTAT |
| | UTGTATAAAGUAUAUAAGAGATGUTTGGGATUTGGTGATGUTGUAURGGAGATTTU |
| | AAUUTGTTTTTUAAAGTGATTUUTAGGGAGTGTGAXGATUTUAAUTUTTTTGGAAGT |
| | GAUTTGTUAAAUUATGAGUUATGUTGAGTTUAGUAUAAGTAATATGAGGRGAGGUA |
| | AGGUAAGTGGGTGAGTAAGGAGGAAGUAGUUUAGATGAGURGGUAGAGTGUUUAU |
| | TGGGAGTGAGGUATGATG |
| 454 | ATUATGUUTUAUTUUUAGTGGGUAUTUTGURGGUTUATUTGGGUTGUTTUUTUUTT |
| | AUTUAUUUAUTTGUUTTGUUTRGUUTUATATTAUTTGTGUTGAAUTUAGUATGGUTU |
| | ATGGTTTGAUAAGTUAUTTUUAAAAGAGTTGAGATXGTUAUAUTUUUTAGGAATUA |
| | UTTTGAAAAAUAGGTTGAAATUTURGGTGUAGUATUAUUAGATUUUAAGUATUTUT |
| | TGTGTGUTTTATAUAGATAGAATUTGTATTTTGUATTUTAAUTUUTGUUUAAAGAAA |
| | AAAATUAAAAGAGGUAAU |
| 455 | AUAAGAGATGUTTGGGATUTGGTGATGUTGUAURGGAGATTTUAAUUTGTTTTTUAA |
| | AGTGATTUUTAGGGAGTGTGARGATUTUAAUTUTTTTGGAAGTGAUTTGTUAAAUUA |
| | TGAGUUATGUTGAGTTUAGUAUAAGTAATATGAGGXGAGGUAAGGUAAGTGGGTG |
| | AGTAAGGAGGAAGUAGUUUAGATGAGURGGUAGAGTGUUUAUTGGGAGTGAGGUA |
| | TGATGAGGATTAUTRGTRGTGGGAGGUATGAGGGUAUTUTUTGGUAAGGTTUUTTG |
| | UATUAUUAAAATGAGGTUAU |
| 456 | TGAUUTUATTTTGGTGATGUAAGGAAUUTTGUUAGAGAGTGUUUTUATGUUTUUUA |
| | RGARGAGTAATUTTTUATUATGUUTUAUTUUUAGTGGGUAUTUTGURGGUTUATUTG |
| | GGUTGUTTUUTUUTTAUTUAUUUAUTTGUUTTGUUTXGUUTUATATTAUTTGTGUTG |
| | AAUTUAGUATGGUTUATGGTTTGAUAAGTUAUTTUUAAAAGAGTTGAGATRGTUAU |
| | AUTUUUTAGGAATUAUTTTGAAAAAUAGGTTGAAATUTURGGTGUAGUATUAUUAG |
| | ATUUUAAGUATUTUTTGTG |
| 457 | AGUAAAUAGAGGGTATGGTUUAAUTTGUUTATGAAURGGGAAGUATAATATTTTAA |
| | TATTTGTGUUTTAAGUAGTTGTTTTATTTTAAAAGUAUAGGAAATUUTGTUTTTTTU |
| | TGTTATAAAATUTTAUAAAGUTAUTGGAAAGATUTUXGUAGGUUAGTGGTTTTUAA |
| | AGTGGGTTUUUAGAAUTAGUAAUAGUTGAATUATURGGGAAUTGGTTAGAAATGUA |
| | AAGTUTRGURGUUAUUUUTUAAUUUUUUAGAUUTAATGAAUUAGAAATTUTGGGG |
| | TGTGGUUUAGTGGUUTGRG |
| 458 | RGUAGGUUAUTGGGUUAUAUUUUAGAATTTUTGGTTUATTAGGTUTGGGGGGTTGA |
| | GGGGTGGRGGRGAGAUTTTGUATTTUTAAUUAGTTUURGGATGATTUAGUTGTTGUT |
| | AGTTUTGGGAATRTUAUTTTGAAAAUUAUTGGUUTGXGGAGATUTTTUUAUTAUUTT |
| | TGTAAGATTTTATAAUAAGAAAAAAGAUAGGATTTUUTGTGUTTTTAAGTAAAAUA |
| | AUTGUTTAAGGUAUAAATATTAAAATATTATGUTTUURGGTTUATAGGUAAGTTGGA |
| | UUATAUUUTUTGTTTGUT |
| 459 | GUUUTAUUURGUTUTUTURGAUTUUUURGGGUURGGUUTGRGUUTTUUTGRGGTGU |
| | RGAGGAGRGGTGGRGUUUTGGGTGAAGAAGTUURGURGAGTRGAGGGGRGUAATG |
| | GAGGAGRGURGGAAUAGGTUTUTUATTURGAGTAGUTAUXGTTGUAUTGTGRGAGT |
| | GTAAAAGTUAUTTUUAUURGGTUTUAGTTGTTUUAAUUTUAGTTGAAGTGAGGAGG |
| | TTGGAUTGGAAGGTTTUTGGGGTUAUTUUAGTGAGGUTGGGGTTUTAGTUUUAATU |
| | TUAURGTGGUAUUUUAAAGGU |
| 460 | GUUTTTGGGGTGUUARGGTGAGATTGGGAUTAGAAUUUUAGUUTUAUTGGAGTGAU |
| | UUUAGAAAUUTTUUAGTUUAAUUTUUTUAUTTUAAUTGAGGTTGGAAUAAUTGAGA |
| | URGGGTGGAAGTGAUTTTTAUAUTRGUAUAGTGUAAXGGTAGUTAUTRGGAATGAG |
| | AGAUUTGTTURGGRGUTUUTUUATTGRGUUUUTRGAUTRGGRGGGAUTTUTTUAUU |
| | UAGGGRGUUAURGUTUUTRGGUAURGUAGGAAGGRGUAGGURGGGUURGGGGGAG |
| | TRGGGGAGAGRGGGGTAGGGU |
| 461 | GGAUAUAATUTUTGTTUTTUAAAGTTGGUAUTAAGAGUTUUTUUTGRGGTTUUUUTT |
| | UUTUTUUTRGAGUAGUAAAGGRGTGGTUUAUAATGUUUAUUUTGTGGGGTUTAGGG |
| | GTGUURGGUTTGUTGAUUTUUAGGUUUUUTUTGTGGXGAGGTTTGGAUTGUATAUA |
| | TGGTGUAGGUUUUTUATUAUTGGAGUTGUUAGGAUAGUAUTGGAGAUUUTAAGUU |
| | AATAUUTATTTTTGGUAATAATTATUAAGUATTTGTAAAAGUURGGGTATGUTGGUA |
| | AATUTTTTTAAAATAAGAG |
| 462 | UTUTTATTTTAAAAAGATTTGUUAGUATAUURGGGUTTTTAUAAATGUTTGATAATT |
| | ATTGUUAAAAATAGGTATTGGUTTAGGGTUTUUAGTGUTGTUUTGGUAGUTUUAGT |
| | GATGAGGGGUUTGUAUUATGTATGUAGTUUAAAUUTXGUUAUAGAGGGGGUUTGG |
| | AGGTUAGUAAGURGGGUAUUUUTAGAUUUUAUAGGGTGGGUATTGTGGAUUARGU |
| | UTTTGUTGUTRGAGGAGAGGAAGGGGAAURGUAGGAGGAGUTUTTAGTGUUAAUTT |
| | TGAAGAAUAGAGATTGTGTUU |
| 463 | AUTTGAGRGUTTUTUUAUUUUAGUAGGUURGUTGUUATUAAGGGUTTAUUUTGTGG |
| | GUTGUUUARGUTGUTGTAAUUAGTGAUUAUAAGUTURGTGGTGTTGAGAAGUAUAT |
| | GTTTUTUUTUUUARGGUTGTGTAGGTURGGAGTUUTAXGGGUTUAGUUAGTUUUUU |
| | TGUTUUAGGTTTAAUUAGGURGGAATUAAGATGUUAGGGUUTGGUTGTGUTTTGGA |
| | GGUTUTTGGTGAGAAUUTGUTTUTGGUUTGGTGUAGGGTGTGGUAGAATUURGATG |
| | UTTGAGTTTGAATGGTGAAA |
| 464 | TTTUAUUATTUAAAUTUAAGUATRGGGATTUTGUUAUAUUUTGUAUUAGGUUAGAA |
| | GUAGGTTUTUAUUAAGAGUUTUUAAAGUAUAGUUAGGUUUTGGUATUTTGATTUR |
| | GGUUTGGTTAAAUUTGGAGUAGGGGGAUTGGUTGAGUUXGTAGGAUTURGGAUUT |
| | AUAUAGURGTGGGAGGAGAAAUATGTGUTTUTUAAUAUUARGGAGUTTGTGGTUAU |
| | TGGTTAUAGUAGRGTGGGUAGUUUAUAGGGTAAGUUUTTGATGGUAGRGGGUUTG |
| | UTGGGGTGGAGAAGRGUTUAAGT |
| 465 | AAAUTUARGUTGGUUUAAGAGGAGGAAUAGAGAAGUTTUUTGGUTGAGGUUUAGU |
| | RGAUTGUTGAUURGGAAAAGTTTUTRGAGGTGAUTUAUATUUUUAGUUTUTGUAUA |
| | TGTGGGTGAGUUAGTTGTAGUTUTGTTUUXGTGAUTGAGUAXGGGAXGURGGAGGT |
| | ATTUATUAGGUATGAGGTTATUTGUUTAUTTUUUATGTGTUAGURGAGTGAURGAA |
| | TUTUAGTUUUTTAGUUUUTAUATUUUTAGGGTUUTAGTGGAUTGTAAGUTGGTGAT |
| | AAGAGTTGTGUTGUUUTUAUT |
| 466 | GTGAGGGUAGUAUAAUTUTTATUAUUAGUTTAUAGTUUAUTAGGAUUUTAGGGATG |
| | TAGGGGUTAAGGGAUTGAGATTRGGTUAUTRGGUTGAUAUATGGGAAGTAGGUAGA |
| | TAAUUTUATGUUTGATGAATAUUTURGGXGTUUXGTGUTUAGTUAXGGGAAUAGAG |
| | UTAUAAUTGGUTUAUUUAUATGTGUAGAGGUTGGGGATGTGAGTUAUUTRGAGAA |
| | AUTTTTTRGGGTUAGUAGTRGGUTGGGUUTUAGUUAGGAAGUTTUTUTGTTTTUTUU |
| | TUTTGGGUUAGRGTGAGTTTT |
| 467 | AUTTGAGRGUTTUTUUAUUUUAGUAGGUURGUTGUUATUAAGGGUTTAUUUTGTGG |
| | GUTGUUUARGUTGUTGTAAUUAGTGAUUAUAAGUTURGTGGTGTTGAGAAGUAUAT |
| | GTTTUTUUTUUUARGGUTGTGTAGGTURGGAGTUUTAXGGGUTUAGUUAGTUUUUU |
| | TGUTUUAGGTTTAAUUAGGURGGAATUAAGATGUUAGGGUUTGGUTGTGUTTTGGA |
| | GGUTUTTGGTGAGAAUUTGUTTUTGGUUTGGTGUAGGGTGTGGUAGAATUURGATG |
| | UTTGAGTTTGAATGGTGAAA |
| 468 | TTTUAUUATUAAAUTUAAGUATRGGGATTUTGUUAUAUUUTGUAUUAGGUUAGAA |
| | GUAGGTTTTTAUUAAGAGUUTUUAAAGUAUAGUUAGGUUUTGGUATUTTGATTUR |
| | GGUUTGGTTAAAUUTGGAGUAGGGGGAUTGGUTGAGUUXGTAGGAUTURGGAUUT |
| | AUAUAGURGTGGGAGGAGAAAUATGTGUTTUTUAAUAUUARGGAGUTTGTGGTUAU |
| | TGGTTAUAGUAGRGTGGGUAGUUUAUAGGGTAAGUUUTTGATGGUAGRGGGUUTG |
| | UTGGGGTGGAGAAGRGUTUAAGT |
| 469 | GRGAATAAAAAGUUAGTGTGTGAGUAAGTUTGTGGGAAGATGUATGUAGAGTGTGA |
| | UAGAGAGTTTAGGGGUTRGTGTGAUAATURGTGGAAATGTTTUTAAAGGRGAGGGT |
| | ATGTGTGTGGGTGTGAGGAUURGGUTGTTGGATGTTTAXGTATTTTATTAGUTAGAT |
| | ARGGGAGUTAATAUTUAATTGUAGTGUAUTAAAUATTATTAGGTGGGTATGATTTTG |
| | AGGGAATGAGGGAAGGGAGAUAAGGTUTGGTGAGATUATUTGTGGGATTATUTGTG |
| | TGTATTTGUTGGTTTGTA |
| 470 | TAUAAAUUAGUAAATAUAUAUAGATAATUUUAUAGATGATUTUAUUAGAUUTTGT |
| | TTTUUUTTUUTTTUATTUUUTUAAAATUATAUUUAUUTAATAATGTTUUAAGGU |
| | AATTGAGTATTAGUTUURGTATUTAGUTAATAAAATAXGTAAAUATUUAAUAGURG |
| | GGTUUTUAUAUUUAUAUAUATAUUUTRGUUTTTAGAAAUATTTUUARGGATTGTUA |
| | UARGAGUUUUTAAAUTUTUTGTUAUAUTTTTGUATGUATUTTUUUAUAGAUTTGUTU |
| | AUAUAUTGGUTTTTATTRGU |
| 471 | UAGTGAGUTGAGAGUARGUUAUTGUAUTUUAGUUTGGGGGATAGAGTGAGAUTUT |
| | GTUUUAAAAAAAGAAAAAAAGAAUTGATUUUAAATGTGTGGGGAGAUTGATTTUAG |
| | TAATAATAAAAUTURGGTUTUUUAUAUAGTUAGUTUTGXGTGAATUUUTUTTTUUU |
| | TATTGRGATTUUUUTGATTTGAGTGAUAGTAAAAUTURGGTUTUUTGUAUAGUUAG |
| | UTUTGRGTGAGTUATTUTTTUTUUUUTGTAATTUUUUTGTUTTGATUUATUA |
| | GTUTGGGUAGUAGGUAAGGT |
| 472 | AUUTTGUUTGUTGUUUAGAUAGAGUTGATGGATUAAGAUAGGGGAATTAUAGGGG |
| | AGAAAGAATGAUTUARGUAGAGUTGGUTGTGUAGGAGAURGGAGTTTTAUTGTUAU |
| | TUAAATUAGGGGAATRGUAATAGGGAAAGAGGGATTUAXGUAGAGUTGGUTGTGT |
| | GGGAGAURGGAGTTTTATTATTAUTGAAATUAGTUTUUUUAUAUATTTGGGATUAGT |
| | TUTTTUTTUTUTTUUUGAGAUAGAGTUTUAUTUTATUUUUUAGGUTGGAGTGUAGT |
| | GGRGTGUTUTUAGUTUAUTG |
| 473 | GGATGTRGGTGTGUUAAUUUUAGUTUUAUUUUAUTGUTAAAGUTTAAGUTUTUUUU |
| | TUUUURGTTAAGUTGTATGAUUTTGAGTUUTTGTGUUTUAUTGTUUTUATUTGTUA |
| | AGTGAAAATGUTUUUAGTUUUUAUUTURGGGAGTTGXGTGGGAGGUAUAUATGAA |
| | UAUUAGGAAAGTGAGTTTATGUAGUURGGGUUAGGGAUTURGGTUTUTGUUTUTGU |
| | UUTAATUUUUARGGUUTGGGGGAARGTGUAGGGUTGAGGAAGRGUAGUUTUTUUT |
| | TGGAATUTUAGRGGAAGUTUU |
| 474 | GGAGUTTURGUTGAGATTUUAAGGAGAGGUTGRGUTUUTUAGUUUTGUARGTTUU |
| | UUUAGGURGTGGGGATTAGGGUAGAGGUAGAGAURGGAGTUUUTGGUURGGGUTG |
| | UATAAAUTUAUTTTUUTGGTGTTUATGTGTGUUTUUUAXGUAAUTUURGGAGGTGG |
| | GGAUTGGGAGUATTTTUAUTTGAUAGATGAGGAUAGTGAGGUAUAAAGAAUTUAA |
| | GGTUATAUAGUTTAARGGGGGAGGGGAGAGUTTAAGUnTAGUAGTGGGGTGGAGU |
| | TGGGGTTGGUAUAURGAUATUU |
| 475 | TAATTGAATUAUATAATTUATTTUUATTATUTGAGTTUURGGUTTAGGUTUTTTGAG |
| | TAUUARGAATUAGGAATGAUTATGUTUUAUTTUAUUUTTRGUTAGTUAAAGAUTGU |
| | UAGGAGGUURGGGGTTGTGGTATTUAARGTTAUAGAXGTAAGGUUUTUUTGUUUAU |
| | UUAGUAUTUUAAATATTTUATGAUATATGAAGGUTUTGAUATTGUAAAURGGAUTA |
| | RGAUAAGUUTTTGAUTTTUURGGGTTGTGAGGAGTTTTAGAAAATAAUTGAGAAGU |
| | AAUTTTTTTGAGGATGATG |
| 476 | UATUATUUTUAAAAAAGTTGUTTUTUAGTTATTTTUTAAAAUTUUTUAUAAUURGGA |
| | GAAGTUAAAGGUTTGTRGTAGTURGGTTTGUAATGTUAGAGUUTTUATATGTUATGA |
| | AATATTTGGAGTGUTGGGTGGGUAGGAGGGUUTTAXGTUTGTAARGTTGAATAUUA |
| | UAAUUURGGGUUTUUTGGUAGTUTTTGAUTAGRGAAGGGTGAAGTGGAGUATAGTU |
| | ATTUUTGATTRGTGGTAUTUAAAGAGUUTAAGURGGGAAUTUAGATAATGGAAATG |
| | AATTATGTGATTUAATTA |
| 477 | UAAUATTUTTGTATUUAGUATUUTTTGTUATGTUATTUTATAGATGUTUTUAUTAA |
| | AGTGATGGUUAATTTUUTAUUUTTRGAATURGGGTUTTGGUAAATGGGATGTTAAU |
| | AAUAGUTUUUAAAUAGAGGATUAUATAGTAUTTGXGTGAGUUUAUUUUUTUTTAT |
| | GTTUTTUAAGUATGUUATGAGAAUAXGUUTGGGTUAGUUTGUTGAAGGAGUTGAGU |
| | TGAGTUATUURGGTGAUAGUUAGUTGAUTUTTAGUAGTGAGAGGUAUUUUUAUAA |
| | AGUTGUTUTGUTGAUUAUU |
| 478 | GTGGTUAGUAGAGUAGUTTTGTGGGGGTGUUTUTUAUTGUTAAGAGTUAGUTGGUT |
| | GTUAURGGGATGAUTUAGUTUAGUTUUTTUAGUAGGUTGAUUUAGGXGTGTTUTUA |
| | TGGUATGUTTGAAGAAUATAAGAGGGGAGTGGGUTUAXGUAAGTAUTATGTGATUU |
| | TUTGTTTGGGAGUTGTTGTTAAUATUUUATTTGUUAAAGUURGGATTRGAAGGGTAA |
| | GGAAATTGGUUATUAUTTTAGTGAGAGUATUTATAGAATGAUATGGUAAAGGATGU |
| | TGGATAUAAGGAATGTTGU |
| 479 | GUTUTUAUTAAAGTGATGGUUAATTTUUTTAUUUTTRGAATURGGGUTTTGGUAAAT |
| | GGGATGTTAAUAAUAGUTUUUAAAUAGAGGATUAUATAGTAUTTGXGTGAGUUUA |
| | TTTUUUUTUTTATGTTUTTUAAGUATGUUATGAGAAUAXGUUTGGGTUAGUUTGUTG |
| | AAGGAGUTGAGUTGAGTUATUURGGTGAUAGUUAGUTGAUTUTTAGUAGTGAGAG |
| | GUAUUUUUAUAAAGUTGUTUTGUTGAUUAUUUUAGAUAUARGAGUAAAAGAAATG |
| | TTTAUUATTAUATGTUAUTGAG |
| 480 | TUAGTGAUATGTAATGGTAAAUATTTUTTTTGUTRGTGTGTUTGGGGTGGTUAGUAG |
| | AGUAGUTTTGTGGGGGTGUUTUTUAUTGUTAAGAGTUAGUTGGUTGTUAURGGGAT |
| | GAUTUAGUTUAGUTUUTTUAGUAGGUTGAUUUAGGXGTGTTUTUATGGUATGUTTG |
| | AAGAAUATAAGAGGGGAGTGGGUTUAXGUAAGTAUTATGTGATUUTUTGTTTGGGA |
| | GUTGTTGTTAAUATUUUATTTGUUAAAGUURGGATTRGAAGGGTAAGGAAATTGGU |
| | UATUAUTTTAGTGAGAGUA |
| 481 | UUUUAGUUAAAUUAUTRGAUTGUUUUUUATUAUUTATAUTGGURGTTTTUUUTGG |
| | AGUUTGUAUUUAAUAGTGGUAAUAUUTTGTGGUURGAGUUUUTUTTUAGUTTGGTU |
| | AGTGGUUTAGTGAGUATGAUUAAUUUAURGGUUTUUTXGTUUTUAGUAUUATUTU |
| | UAGRGGUUTUUTURGUUTURGUUTUUUAGAGUUUAUUUUTGAGUTGRGUAGTGUU |
| | ATUUAARGAUAGUAGTUUUATTTAUTUAGRGGUAUUUAUUTTUUUUARGURGAAU |
| | AUTGAUATTTTUUUTGAGUUAUA |
| 482 | TGTGGUTUAGGGAAAATGTUAGTGTTRGGRGTGGGGAAGGTGGGTGURGUTGAGTA |
| | AATGGGAUTGUTGTRGTTGGATGGUAUTGRGUAGUTUAGGGGTGGGUTUTGGGAGG |
| | RGGAGGRGGAGGAGGURGUTGGAGATGGTGUTGAGGAXGAGGAGGURGGTGGGTT |
| | GGTUATGUTUAUTAGGUUAUTGAUUAAGUTGAAGAGGGGUTRGGGUUAUAAGGTG |
| | TTGUUAUTGTTGGGTGUAGGUTUUAGGGAAAAGRGGUUAGTATAGGTGATGGGGGG |
| | UAGTRGAGTGGTTTGGUTGGGG |
| 483 | GUAGTGGUTGGGUUUUUAUUUUUUAGGAAAUTUAAAAUUUTGGGUUAGURGRGGG |
| | TGGRGGGTTGGGGUAGGUAUAAAGAGGGUUTUTGTGRGGURGGUTGGGUTGUUUA |
| | UAGGATTUTGGGGGAGGAGGURGGAGURGGTTTUXGTUURGTTUTGUTTUUTGRGG |
| | AGGUTGRGGAATGUURGGAGUTUTGGUUUAGUUTGUUURGTUTGGUUUAUURGUA |
| | GUUUUTTUUUUATTUUTTTUUAGGGUUTTGGGGTAUAGTUT |
| | AGGGUUUTGAGAGUUAUUUTUUA |
| 484 | TGGAGGGTGGUTUTUAGGGUUUTGTTGUAGAGAAGTUTGUAGUTGTAUUUUAAGGU |
| | UUTGGAAAAGATGGGGAAGGGGUTGRGGGTGGGUUAGARGGGGUAGGUTGGGUUA |
| | GAGUTURGGGUATTURGUAGUUTURGUAGGAAGUAGAAXGGGARGGAAAURGGUT |
| | URGGUUTUUTUUUUUAGAATUUTGTGGGUAGUUUAGURGGURGUAUAGAGGUUUT |
| | UTTTGTGUUTGUUUUAAUURGUUAUURGRGGUTGGUUUAGGGTTTTGAGTTTUUTG |
| | GGGGGTGGGGGUUUAGUUAUTGU |
| 485 | AGGUAUURGTUAUAARGUURGGUTAATTTTTTTGTATTTTTTAGTAGAGARGGGGTT |
| | TUAURGTGTTAGUUAGGATGGTUTUAGTUTUUTGAUUTTGTGATUUAUUUAUUTUA |
| | GUUTUUUAAAGTGUTGGGATTAUAGATGTGAGUTAUXGUAUURGGUUAAGTTUATG |
| | ATUTTTUTGTAUTUTGAGUUAGTGTTAUTGGUAAAGAATGUUUTGGGUATTGTGGTG |
| | TGGATGGAAGUUAGGUAUATTGUATUUATTUUTTUUTAGAUTAAGTTGUUTGGUUT |
| | GTGGAUUTTUTUAGUUAG |
| 486 | UTGGUTGAGAAGGTUUAUAGGUUAGGUAAUTTAGTUTAGGAAGGAATGGATGUAA |
| | TGTGUUTGGUTTUUATUUAUAUUAUAATGUUUAGGGUATTUTTTGUUAGTAAUAUT |
| | GGUTUAGAGTAUAGAAAGATUATGAAUTTGGURGGGTGXGGTAGUTUAUATUTGTA |
| | ATUUUAGUAUTTTGGGAGGUTGAGGTGGGTGGATUAUAAGGTUAGGAGAUTGAGA |
| | UUATUUTGGUTAAUARGGTGAAAUUURGTUTUTAUTAAAAAATAUAAAAAAATTAG |
| | URGGGRGTTGTGARGGGTGUUT |
| 487 | TTURGTGGGGATGUAAUUTRGTTTGUUUUTUTGAUTTUUUUATGAGATUTUTRGUTT |
| | UUTUUUAUAUUTUUTTTATUUUUUAAUUUUUTGURGGTUUAUUAGGUTGUAGUT |
| | GGGTUTGRGGGTAGGGGAUATTUUTAGGTUTTGAUXGUUAGAGUAUURGGTUUAGT |
| | UURGGUUAUAGUUTTTGGUUUAAGTGAGGGUTGGUUTGGGGAUAAGURGAAATUA |
| | GGGUUUTGGUTGTATUUAGAAAGAGAAUTGAGAUURGTTGUUTUUUAUTGGGUUA |
| | UUUUURGAUUUUAAUUAUATA |
| 488 | ATGTGGTTGGGGTRGGGGGGTGGUUUAGTGGGAGGUAARGGGTUTUAGTTUTUTTT |
| | UTGGATAUAGUUAGGGUUUTGATTTRGGUTTGTUUUUAGGUUAGUUUTUAUTTGGG |
| | UUAAAGGUTGTGGURGGGAUTGGAURGGGTGUTUTGGXGGTUAAGAUUTAGGAAT |
| | GTUUUUTAUURGUAGAUURGUAGUTGUAGUUTGGTGGAURGGUAGGGGGTTGGGG |
| | GATAAAGGAGGTGTGGGAGGAAGRGAGAGATUTUATGGGGAAGTUAGAGGGGUAA |
| | ARGAGGTTGUATUUUUARGGAAT |
| 489 | UTTATAUURGGTUUTRGUUUUTUUAGRGURGGUUTRGUURGRGUTUUTGAGAAAGU |
| | UUTGUURGUTURGUTUARGGURGTGUUUTGGUUAAUTTUUTGUTGRGGURGGRGGG |
| | UUUTGGGAAGUURGTGUUUUUTTUUUTGUURGGGUUTXGAGGAUTTUUTUTTGGUA |
| | GGRGUTGGGGUUUTUTGAGAGUAGGUAGGUURGGUUTTTGTUTURGRGAGGUUUA |
| | UUURGGUURGUAUUTTRGUTTTGRGGTUTGAUUUUARGRGUUUUUUTGUAGGGUTG |
| | GGUURGGGTGAGGGGAGUTTU |
| 490 | GAAGUTUUUUTUAUURGGGUUUAGUUUTGUAGGGGGGRGRGTGGGGTUAGAURGU |
| | AAAGRGAAGGTGRGGGURGGGGTGGGUUTRGRGGAGAUAAAGGURGGGUUTGUUT |
| | GUTUTUAGAGGGUUUUAGRGUUTGUUAAGAGGAAGTUUTXGAGGUURGGGUAGGG |
| | AAGGGGGUARGGGUTTUUUAGGGUURGURGGURGUAGUAGGAAGTTGGUUAGGGU |
| | ARGGURGTGAGRGGAGRGGGUAGGGUTTTUTUAGGAGRGRGGGRGAGGURGGRGU |
| | TGGAGGGGRGAGGAURGGGTATAAG |
| 491 | AGUTUUTTTATUAGAAAGGGUAGURGUAGAGUURGRGTGTGRGRGATGTGGUTGRG |
| | GGTGGGGAGRGGGRGGRGGGUURGGGAUAURGRGGUUAUTGTTUTAGUUURGUUT |
| | GGGURGUUTGAURGRGGUTURGUTGRGURGUAGUUURGXGUUUUTUTGGUTUUTGT |
| | TUURGGGRGRGGGGAGAAGGRGGRGGGGRGRGUUTGGGUURGRGRGGGTGRGAAR |
| | GRGAGGTUTTTUUTGGGTGUTUUUAGGTRGGAGGATTUUUAGGGRGGGGGUUATUA |
| | GGGTGGRGAGGAAURGGUAGGG |
| 492 | UUUTGURGGTTUUTRGUUAUUUTGATGGUUUURGUUUTGGGAATUUTURGAUUTGG |
| | GAGUAUUUAGGAAAGAUUTRGRGTTRGUAUURGRGRGGGUUUAGGRGRGUUURGU |
| | RGUUTTUTUUURGRGUURGGGAAUAGGAGUUAGAGGGGXGRGGGGUTGRGGRGUA |
| | GRGGAGURGRGGTUAGGRGGUUUAGGRGGGGUTAGAAUAGTGGURGRGGTGTUUR |
| | GGGUURGURGUURGUTUUUUAUURGUAGUUAUATRGRGUAUARGRGGGUTUTGRG |
| | GUTGUUUTTTUTGATAAAGGAGUT |
| 493 | TGGAAAAGUUAAUTGTGUAAAUATTRGUTTUTAURGTUAUAAGGTGAAAAGGAAAA |
| | ATGUUAAAAAGGAGAGUTTGGAAAUAUAGUAGAAGAGUAATGAUUUUUTGUAGAG |
| | AAUATGAAATAAGATURGGUAGTGAUUUUAUTAAAGAUAXGGAAAATAAGGTUUA |
| | AUUUAGAAUTGGTUAGAGAAUAUUAUTGTGUTTTAGAGTAAUAATTAUAAAGGAA |
| | AAGAGGGATRGGGUAUTGTAATATUURGGGAUTGUAGUTTGTAUTUTUTGGGTGGT |
| | GUATTUTGTAATTUAATTAAATU |
| 494 | GATTTAATTGAATTAUAGAATGUATTUAUUUAGAGAGTAUAAGUTGUAGTUURGGGA |
| | TATTAUAGTGUURGATUUUTUTTTTUUTTTGTAATTGTTAUTUTAAAGUAUAGTGGT |
| | GTTUTUTGAUUAGTTUTGGGTTGGAUUTTATTTTUXGTGTUTTTAGTGGGGTTUAUTG |
| | URGGATUTTATTTUATGTTUTUTGUAGGGGGTUATTGUTUTTUTGUTGTGTTTUUAA |
| | GUTUTUUTTTTTGGUATTTTTUUTUTUTTTTUTTGTGARGGTAGAAGRGAATGTTTGUA |
| | UAGTTGGUTTTTUUA |
| 495 | UTGUAGATTGAUAUTGTTAATUAUAAAUAAGUUUAGGGTTGTGTTUAGAGAUAAAG |
| | TUAGTGTGAURGGTGAUTGTTAUAGUAATAUAAAATAATGGUAGUAGTUUUAUTAG |
| | URGAGGUUAGUATRGAATAGGGUAAGTTAUTUAAAUAXGTUAUUUTAGRGAUUAU |
| | TUUAAAUAUUTGTGUTTAAAUTAAUTTAGGGAGUURGGTTTTGUAGGATGTGUAAU |
| | UARGTTGTGUUUUUTAGGGUTUAUUAGAUTTTAGTAUUTAATGUAGUTAUUUTUAU |
| | RGTGGUUUAGGTTUUUAGGGA |
| 496 | UUUTGGGAAUUTGGGUUARGGTGAGGGTAGUTGUATTAGGTAUTAAAGTUTGGTGA |
| | GUUUTAGGGGGUAUAARGTGGTTGUAUATUUTGUAAAAURGGGUTUUUTAAGTTAG |
| | TTTAAGUAUAGGTGTTTGGAGTGGTRGUTAGGGTGAXGTGTTTGAGTAAUTTGUUUT |
| | ATTRGATGUTGGUUTRGGUTAGTGGGAUTGUTGUUATTATTTTGTATTGUTGTAAUA |
| | GTUAURGGTUAUAUTGAUTTTGTUTUTGAAUAUAAUUUTGGGUTTGTTTGTGATTAA |
| | UAGTGTUAATUTGUAGG |
| 497 | AAAUAUAGUUAGTUTGTTUTAGUUTUTGTUUTUATTTTUUAUAUUUAGGTTTG |
| | UUAGTTUUTTGTUUUAUAGTGATGGGUTTGGGAUTATGGGGTGTUUATTURGGGUTT |
| | UUUTGGUTTGUTTAUTTTUTUATGGGTGUTTTGAGXGUUTTTTTUGAGURGGUTUAG |
| | GUTTTUUUUUUAUAUUUTITUUTUUUTGUTTUTATUAGGUUAAGGGTTTAGATTT |
| | TRGGTUAGTGAGTUATUUAAAUUTGGGTGTGGAAAGUAUUTGGGAUAUUAUTTGTA |
| | TTTGGUTUUTTTTAGUT |
| 498 | AGUTAAAAGGAGUUAAATAUAAGTGGTGTUUUAGGTGUTTTUUAUAUUUAGGTTTG |
| | GATGAUTUAUTGAURGAAGUTUTGAUUUTUAUTGUUAGATAGAAGUAGGGAGGAA |
| | AGGGTGTGGGGGGAAAGUUTGAGURGGUTUAAAAAAGGXGUTUAAAGUAUUUATG |
| | AGAAAGTAAGUAAGUUAGGGAAGUURGGAATGGAUAUUUUATAGTUUUAAGUUUA |
| | TUAUTGTGGGAUAAGGAAUTGGAGUAAAGGGAAGGGGGAAGAAAATGAGGAUAGA |
| | GGUTAGAAUAGAUTGGUTGTGTTT |
| 499 | GTUUUUAAAGGUTGAAUUTTTGATUAATGUAGUUUAAGUTGUARGGGUAGAGAAA |
| | GGGTGRGGGGTAGGGGURGGGGTTGGGRGUTGAGUTUUTUTGAAURGGTTGUUAGG |
| | UAAUAGAATGGAAATTUARGGGRGGUTAAATGGAGUTUXGUUAUAAATGTTUTGTG |
| | GUAAAUURGGAUUUAGTUAUATRGUUUTTTUUUUUUUUUTUUUTTTUUUGGGGUT |
| | TUTUATUTGTAAATGAGAAGGGTGUAGAGAAGAUTUTTTTUTTRGGAGTUAGTGUUT |
| | URGGTTTGUAUTGUTTTTUA |
| 500 | TGAAAAGUAGTGUAAAURGGAGGUAUTGAUTURGAAGAAAAGAGTUTTUTUTGUA |
| | UUUTTUTUATTTAUAGATGAGAAAAUTUAGTGGGGTGGGAGGGGGGAGAAAGGGR |
| | GATGTGAUTGGGTURGGGTTTGUUAUAGAAUATTTGTGGXGGAGUTUUATTTAGUR |
| | GUURGTGAATTTUUATTUTGTTGUUTGGUAAURGGTTUAGAGGAGUTUAGRGUUUA |
| | AUUURGGUUUUTAUUURGUAUUUTTTUUTGUURGTGUAGUTTGGGUUGGUUUUAGG |
| | UAAAGGTTUAGUUTTTGGGGAU |
| 501 | UTUUAURGURGGUTRGUUUUUTGAGGAGGGGGUTGGGUUAGGGUUTRGGUTGAUR |
| | GGGGAGGAAGAAGGGGAGUAGAGAAAAAUATGAGTUAUAGURGTGTGTUAUTGGA |
| | GRGUATTTUAATTUUUTGUATUAUAGGAGGTGTGGAAGGUXGUUTRGGGGAURGGG |
| | RGRGGGAGGTGRGUURGAGAAGGUUURGGGURGGUUTGUAGGGRGRGURGUTURG |
| | UUTGRGUUUTTTUUTUUUTAURGUUUTUUURGUUATUTTUUUUTTTGGUTTUUTTU |
| | TRGUTRGGTGUAAUAAGTUTTT |
| 502 | AAAGAUTTGTTGUAURGAGRGAGAAGGAAGUUAAAGGGGAAGATGGRGGGGAGGG |
| | RGGTGGGGGAGGAAAGGGRGUAGGRGGAGRGGRGRGUUUTGUAGGURGGUURGGG |
| | GUUTTUTRGGGRGUATUTUURGRGUURGGTUUURGAGGXRGGUUTTUUAUAUUTUU |
| | TGTGATGUAGGGAATTGAAATGRGUTUUAGTGAUAUARGGUTGTGAUTUATGTTTTT |
| | UTUTGUTUUUUTTUTTUUTUUURGGTUAGURGAGGUUUTGGUUUAGUUUUUTUUTU |
| | AGGGGGRGAGURGGRGGTGGAG |
| 503 | UUTGAAGAGUATTUTUUUTGAGTGUTUAATGATATGUUAGAGUATGTUTUAAATGR |
| | GGAGGATGGGGAGGURGGUTUUUTGGUAGATUTTUATGGAGAAGUTGAUTUUAGU |
| | RGGUTTGTGTGUURGTUUUAGAGGAGRGGAAAUAGAGUXGAAGUUUAUAUUUUUA |
| | GGGUUUAGGUUUAGUUUTTUUAAGTURGGAGUTUAUUUAGUUTGUUUUTRGGUTU |
| | UTTUATUUTUUTUUAGAUAURGTUUUTTUTTUTGTUTUTGUATTTUUUATUUTUTUR |
| | GUUUUTUUUTGTGUTGUTUTGT |
| 504 | AUAGAGUAGUAUAGGGAGGGGRGGAGAGGATGGGAAATGUAGAGAUAGAAGAAG |
| | GGARGGTGTUTGGAGGAGGATGAAGGAGURGAGGGGUAGGUTGGGTGAGUTURGG |
| | AUTTGGAAGGGUTGGGUUTGGGUUUTGGGGGTGTGGGUTTXGGUTUTGTTTURGUT |
| | UUTUTGGGARGGGUAUAUAAGURGGUTGGAGTUAGUTTUTUUATGAAGATUTGUUA |
| | GGGAGURGGUUTUUUUATUUTURGUATTTGAGAUATGUTUTGGUATATUATTGAGU |
| | AUTUAGGGAGAATGUTUTTUAGG |
| 505 | ATGTUTGGGAGGUUAAAAGUATUTUTUAGAUAGTUTUTAUAGGAUTUTTUUAGGTU |
| | URGGAAGUURGAGRGAGUTTUUTGGAGGAGGTGGUTGGGGAGAGTGGAGGAGURG |
| | GTAGGGGTRGUTGTGUTTGRGRGRGUURGTUUAGGAAUTXGURGGGGUTGTGGGGA |
| | GGGGGRGURGGUUTGGAGAGGAUAATGTAUAGTUTGTTUTAAUAUUUAUUUAUTU |
| | UAAARGUAUAUTTUUUAUUURGTUTUTTGTUUUTUUUAGUUURGGGGUTAGAUUUT |
| | GAGGGUTRGGGURGUAUUTUAU |
| 506 | GTGAGGTGRGGUURGAGUUUTUAGGGTUTAGUUURGGGGUTGGGAGGGAUAAGAG |
| | ARGGGGTGGGAAGTGTGRGTTTGGAGTGGGTGGGTGTTAGAAUAGAUTGTAUATTG |
| | TUUTUTUUAGGURGGRGUUUUUTUUUUAUAGUUURGGXGAGTTUUTGGARGGGRG |
| | RGRGUAAGUAUAGRGAUUUUTAURGGUTUUTUUAUTUTUUUUAGUUAUUTUUTUU |
| | AGGAAGUTRGUTRGGGUTTURGGGAUUTGGAAGAGTUUTGTAGAGAUTGTUTGAGA |
| | GATGUTTTTGGUUTUUUAGAUAT |
| 507 | GGAGRGUTAARGRGUAGTGGGAGGGAAGGAGAGGAUTGAAGAGAGARGGGGGAGG |
| | GGAGAGGAGGGGTRGGUTGUUAGGUUTAGGTGGGGTGAATURGUAGUTGGGUTGA |
| | UTUAAGRGGAGGAGURGGAAGGAUAUUURGRGAGGUTTXGGGGRGRGUTTTTAGG |
| | GAGGRGURGUUTUUAGUTTTGTGUUAGAAAGTGGGGGTTGRGGUTUAGGUTTGAAT |
| | UUAAGAAAGGUTURGGGTGGAAUTUUTGGGUAUUTTGGGTUUTTAUTTTGUUTTUA |
| | GGRGUTGGUUAURGTTGGGAUTT |
| 508 | AGTUUUAARGGTGGUUAGRGUUTGAAGGUAGAGTAAGGAUUUAGGGTGUUUAGGA |
| | GTTUUAUURGGAGUUTTTUTTGGATTUAAGUUTGAGURGUAAUUUUUAUUGGTT |
| | UAUAAAGUTGGAGGRGGRGUUTUUUTAAAAGRGRGUUUXGAAGUUTRGRGGGGTG |
| | TUUTTURGGUTUUTURGUTTGAGTUAGUUUAGUTGRGGATTUAUUUUAUUTAGGUU |
| | TGGUAGURGAUUUUTUUTUTUUUUTUUUURGTUTUTUTTUAGTUUTUTUUTT |
| | UUUAUTGRGRGTTAGRGUTUUU |
| 509 | TATUAGAATUUAUATAUUUAGGTGGGTTTAGGAUUTUTAGGUUTUTUUUTUAGGU |
| | UATAGGAGUAUUUAUUURGGGUTLTUTUTGGAGGGGUAGUUUUAAGGAAUUTGTTG |
| | GGGTAAUTTGTTTGUTUUUUAUAUUURGGGAATGTGUXGTUUTTTUAGGUURGUUU |
| | AUURGGATTUUTGTGUAGGGAGTUAGURGAUAUAGUATGTTGUATGTGUUUTGTGG |
| | GGAUARGTTUTGUUTUUTGTUAGGGGGAGGAGGUTGGRGGURGTGUUTGTGUTGUR |
| | GUAUUTUAGUTUUUUAURGAA |
| 510 | TRGGTGGGGAGUTGAGGTGRGGUAGUAUAGGUARGGURGUUAGUUTUUTUUUUUT |
| | GAUAGGAGGUAGAARGTGTUUUUAUAGGGUAUATGUAAUATGUTGTGTRGGUTGA |
| | UTUUUTGUAUAGGAATURGGGTGGGRGGGUUTGAAAGGAXGGUAUATTUURGGGG |
| | TGTGGGGAGUAAAUAAGTTAUUUUAAUAGGTTUUTTGGGGUTGUUUUTUUAGAGG |
| | AGUURGGGGTGGGTGUTUUTATGGUUTGAGGGAGAGGUUTAGAAAGTUUTAAAUU |
| | UAUUTGGGTATGTGGATTUTGATAU |
| 511 | AGAGGATTTAAGAUTUAUUUAGGGUAAAUAUTGGGAUUAUTGTAAGAGRGUTGGA |
| | AUATTUTGUUTUTTGAGTGAAGGGGUUTTUTTTUTAGUUTUTATGGUAUTGAGGGGT |
| | GRGURGGUTGGTGGAGGAGUAGTURGATGGAGUUUTGXGTTUUURGGGGAUAUAG |
| | GGUUAAGUTTTGAGGTGGAAAGTTTUTGGTTUTGAAAUAAUAAGGAGAGAGTUTGT |
| | TTTTUTTUUTAAAATTTGGAUTUTTGTUTGUAUAAAUTUTGGTUTGTTTTGUARGGTT |
| | TGTGTGUUTTTTTTTUUUT |
| 512 | GGGAAAAAAAGGUAUAUAAAURGTGUAAAAUAGAUUAGAGTTTGTGUAGAUAAGA |
| | GTUUAAATTTTAGGAAGAAAAAUAGAUTUTUTUUTTGTTGTTTUAGAAUUAGAAAU |
| | TTTUUAUUTUAAAGUTTGGUUUTGTGTUUURGGGGAAXGUAGGGUTUUATRGGAUT |
| | GUTUUTUUAUUAGURGGRGUAUUUUTUAGTGUUATAGAGGUTAGAAAGAAGGUUU |
| | UTTUAUTUAAGAGGUAGAATGTTUUAGRGUTUTTAUAGTGGTUUUAGTGTTTGUUU |
| | TGGGTGAGTUTTAAATUUTUTT |
| 513 | TGUUTUTGAGTUTAAAARGGUAGTGGUUTAGGAGUAUAGGGUUTGGGGUUAUGGU |
| | UAGTGUUAUAUUTAAUUTGAGATATGTUUAGAGUTGAGGTUTAGUTUAUAGUATUT |
| | GTGRGTRGGGGAAGUTGGUTGRGGTUARGGURGGTGUAGXGGUUUAAGGAGTUUA |
| | UAAAGUAGTAAUUTTGGUUUAUAUUAUAGUTURGGTGUATTTGGAGAGGGGGUUU |
| | AGTUTAGGUTGAAGTTGGGGGGAGUUTGGUUAGGGUUTGGGUAUUAGGRGUAGGA |
| | UAGAGGGAAAGGUUTUUAGUTUUT |
| 514 | AGGAGUTGGAGGUUTTTUUUTUTGTUUTGRGUUTGGTGUUUAGGUUUTGGUUAGGU |
| | TUUUUUUAAUTTUAGUUTAGAUTGGGUUUUUTUTUUAAATGUAURGGAGUTGTGGT |
| | GTGGGUUAAGGTTAUTGUTTTGTGGAUTUUTTGGGUXGUTGUAURGGURGTGAURG |
| | UAGUUAGUTTUUURGARGUAUAGATGUTGTGAGUTAGAUUTUAGUTUTGGAUATAT |
| | UTUAGGTTAGGTGTGGUAUTGUUUUTGUUUUUAGGUUUTGTGUTUUTAGGUUAUTG |
| | URGTTTTAGAUTUAGAGGUA |
| 515 | GUAGUUUTGGGGRGTGGGGGGRGGUTGTTTUUTGUTGUUUUTTGGGUTGUUAUUTG |
| | UURGAGUTGUUAGUUAUAGTTGGAUTTUUTTUUAGUUUTURGGGGTGUUTGUATTU |
| | UUAUATTRGAGAUAGGUAGTGAGAGGGAGTGAGGGGXGATGATGTUTGUAGUUUA |
| | UAAGAGUUTURGGGUAGTAGUUAGGUUUUTUUGUTUAGUUTGAUUTGUUTGGUUT |
| | UUAGUAGGGTGUTATGGUUUTGGGAGGUUUTGGUTTUTCGGGAATTTGUUTTUUU |
| | UUUTGRGUTUTGUTUTGUTGTG |
| 516 | AUAGUAGAGUAGAGRGUAGGGUAGGGGAGGAAAGGGGGUAGAAGUUAGGGUUTU |
| | UUAGGGUUATAGUAUUUTGUTGGAGGUUAGGUAGGTUAGGUTGAGUAGAGGGGUU |
| | TGGUTAUTGUURGGAGGUTUTGTGGGUTGUAGAUATUATXGUUUUTUAUTUUUTU |
| | TUAUTGUUTGTUTRGAATGTGGGAATGUAGGUAUUURGGAGGGUTGGAAGGAAGTU |
| | UAAUTGTGGUTGGUAGUTRGGGUAGGTGGUAGUUUAAGGGGUAGUAGGAAAUAGU |
| | RGUUUUUUARGUUUUAGGGUTGUU |
| 517 | TUTUTUUTGGGUUAAGUTTTGTGGATGUUUAGUUTGGGGURGRGGGGAGUTGGUAG |
| | GTUAGTGGUAGAUAUTGGTGGGUAGAUUTAGTGTUTGGTAGAAUAGGUATUAAGG |
| | AAGTGGTGAURGGAGGGAAGUUAAGTGUAUTUAAAUUUTXGGGTGAGTUATUAUR |
| | GURGGGTUTTTUAUAGUTGUTGAAAGTGAGUAAUAGTGATGAAGGTTTGTGAGTTT |
| | UTGRGTGAGRGAGTGAATGGAUUAGTAGUAGTTTUUAGGTTGTGGAAGAGRGTTUU |
| | UTUUURGGGATGGGGAUAUTTG |
| 518 | UAAGTGTUUUUATUURGGGGAGGGAARGUTUTTUUAUAAUUTGGAAAUTGUTAUTG |
| | GTUUATTUAUTRGUTUARGUAGAAATTTUAUAAAUUTTUATUAUTGTTGUTUAUTTT |
| | UAGUAGUTGTGAAAGAUURGGRGGTGATGAUTUAUUXGAGGGTTTGAGTGUAUTTG |
| | GUTTUUUTURGGTUAUUAUTTUUTTGATGUUTGTTUTAUUAGAUAUTAGGTUTGUU |
| | UAUUAGTGTUTGUUAUTGAUUTGUUAGUTUUURGRGGUUUUAGGUTGGGUATUUA |
| | UAAAGUTTGGUUUAGGAGAGA |
| 519 | GGUTGGTUTTGAAUTUUTGGGUTUAAGAGUTUUAUUTGUUTUAGUUTUUUAAAGTG |
| | AGUUAUUAGGUUTAUURGGTUUTTTUUTUUATGUTTUTGTGGUUTTTUUTUUTGTT |
| | TAGXGAGUTUTGAUATTUAUTUATAGGTAGGAAUAAAGUUUTUUATTGGTTAGTUT |
| | GGGUTGAGGTGGGXGTGTGTGTTTUTGTATUAGTGATUTGTTTTURGGUAGGUUTUT |
| | UUUTGAGGGGAGAGUTGGTAGUTTUUATGTAAGTGGUAGGGUATAUTTUAUTAAAT |
| | AAAAGATGTGTGGGTGAG |
| 520 | UTUAUUUAUAUATUTTTTATTTAGTGAAGTATGUUUTGUUAUTTAUATGGAAGUTA |
| | UUAGUTUTUUUUTUAGGGAGAGGUUTGURGGAAAAUAGATUAUTGATAUAGAAAU |
| | AUAUAXGUUUAUUTUAGUUUAGAUTAAUUAATGGAGGGTTTTTGTTUUTAUUTATGA |
| | GTGAATGTUAGAGUTXGUTAAAUAGGAGGAAAGGUUAUAGAAGUATGGAGGAAAA |
| | GGAURGGGTAGGUUTGGTGGUTUATTTTGGGAGGUTGAGGUAGGTGGAGUTUTTGA |
| | GUUUAGGAGTTUAAGAUUAGUU |
| 521 | UAAGUATUTTAGTGATGTGAGTUATUAAAAUTTUUTUUTGGGTUTGUTTTGAGUUU |
| | UAUUTTUUTUUTUUTGUAGTUATGTTTUTTAGUUTUAGGGUUUTGGGGRGGAR |
| | GGAUAUTUUUUUAGUAGUUTGUTTTUUAGAGGUUAUTGXGUTGUTUAGUTURGGG |
| | GGUURGTUUTURGTGGATUUUTUUAGGUUUAGUAGAGTGTTTGAUUARGGGUUTGA |
| | URGGGAGGGGAGARGUUAUUTUUTGGGGAUTTGUAUUUUAAUUAGUAUUAUTGTU |
| | ATGAGAUAUURGGAGGUUAGUA |
| 522 | TGUTGGUUTURGGGTGTUTUATGAUAGTGGTGUTGGTTGGGGTGUAAGTUUUUAGG |
| | AGGTGGRGTUTUUUUTUURGGTUAGGUURGTGGTUAAAUAUTUTGUTGGGUUTGGA |
| | GGGATUUARGGAGGARGGGUUUURGGAGUTGAGUAGXGUAGTGGUUTUTGGAAAG |
| | UAGGUTGUTGGGGGAGTGTURGGGRGTURGUUUUAGGGUUUTGAGGUTAAGAGUA |
| | TGAUTGUAGGAGGAGGAAGGTGGGGUTUAAAGUAGAUUUAGGAGGAAGTTTTGAT |
| | GAUTUAUATUAUTAAGATGUTTG |
| 523 | TGATGAUUAGGUAUTGUTATTUTTTAGGURGGGATTTUUUUAAGUUTTGGTATTTTT |
| | AAAAATARGTTATAGTTUUUTTGAAAUTUTUTUUTTATUAUUTUUAUUTTGTTT |
| | TUATUTUUUAUTUUTTGGUAUUUTUTGTUTUUUUAXGGTGTUUUUATGARGUTGUU |
| | TGUATGUUUATTGGUUUUAGUUTGGGAGUTTUTUAGAGARGUURGGGUUAGAUAT |
| | GGUTGUAGATAGAGUUAAGAGGGTGGUUTRGGGTGGUTGGTGGUAGTUTUUTGGUT |
| | GTGGGGGUAGAAGTGGGGG |
| 524 | UUUUUAUTTUTGUUUUUAUAGUUAGGAGAUTGUUAUUAGUUAUURGAGGUUAUUU |
| | TUTTGGUTUTATUTGUAGUUATGTUTGGUURGGGRGTUTUTGAGAAGUTUUUAGGU |
| | TGGGGUUAATGGGUATGUAGGUAGRGTUATGGGGAUAUXGTGGGGAGAUAGAGGG |
| | TGUUAAGGAGTGGGAGATGAAAAUAGGAAGGTGGAGGTGATAAGGAGAGAGTTTU |
| | AAGGGAAUTATAARGTATTTTTAAAAATAUUAAGGUTTGGGGAAATUURGGUUTAA |
| | AGAATAGUAGTGUUTGGTUATUA |
| 525 | GUUTAGUUURGRGRGUAUATAUARGTGTGUTUTURGRGRGGAUUTRGGGAAUTTTG |
| | UUUTUARGUURGRGGRGRGUTTGUUTUURGUURGUUURGGUUTUUAUUUUTGGT |
| | ATGUUUUTTUUUUAGURGGTUTUUUUTUUUUURGGUTXGGGAAGAAGUUTGUTGG |
| | GUUAGGGRGUUUTGAUUAUUTUUTRGGAGGURGGUAAAUUTGUUTGAAURGUUUU |
| | AGAGGAATRGGGUAGGGGUTRGUAUUUUAUUURGGUAGGAGGGUUURGAGAURGA |
| | UURGGGURGGGGUTURGUAGURG |
| 526 | RGGUTGRGGAGUUURGGUURGGGTRGGTUTRGGGGUUUTUUTGURGGGGTGGGGTG |
| | RGAGUUUUTGUURGATTUUTUTGGGGRGGTTUAGGUAGGTTTGURGGUUTURGAGG |
| | AGGTGGTUAGGGRGUUUTGGUUUAGUAGGUTTUTTUUXGAGURGGGGGGAGGGGA |
| | GAURGGUTGGGGAAGGGGUATUTRGAAGGGGTGGAGGURGGGGRGGGRGGGAGGU |
| | AAGRGRGURGRGGGRGTGAGGGUAAAGTTUURGAGGTURGRGRGGAGAGUAUARG |
| | TGTATGTGRGRGRGGGGUTAGGU |
| 527 | GAAARGGRGGTRGUAGUUUTRGGURGGGUARGRGTGGGGURGTTRGTGGAGRGGTG |
| | TUTTGUTAGGURGGTTGGGGTAUTTGRGGGGURGGATGGGUTTGAGGGTGAGXGGR |
| | GGUTGGGGUAGGUTGUUAAAGUURGGGTGGATUTGUTTGTUTTTGAATGUUTTGAT |
| | GGTUTUUAGAGGGGTAATAGGGGGXGGGTTGAUURGGATGGGGTUUATGUUUTGG |
| | AAGGGUTTGTGUTURGGAATGGAGUUUATGTRGTTGGGGTGGTGGTAGAGGTTGTA |
| | GTUAGGAATUATGGGGAAGAG |
| 528 | UTUTTUUUUATGATTUUTGAUTAUAAUUTUTAUUAUUAUUUUAARGAUATGGGUTU |
| | UATTURGGAGUAUAAGUUUTTUUAGGGUATGGAUUUUATURGGGTUAAUUXGUUU |
| | UUTATTAUUUUTUTGGAGAUUATUAAGGUATTUAAAGAUAAGUAGATUUAUURGG |
| | GUTTTGGUAGUUTGUUUUAGURGURXGUTUAUUUTUAAGUUUATURGGUUURGUA |
| | AGTAUUUUAAURGGUUTAGUAAGAUAURGUTUUARGAARGGUUUUARGRGTGUUR |
| | GGURGAGGGUTGRGAURGURGTTTU |
| 529 | TGUTUAGGUTGGAGTGUAGTGGUAAAATUTTGGUTUAUTTUAAUUTURGUUTUURG |
| | GGTTUAAGUAATTUTUUTGUUTUAGUUTUTUAAGTAGUTGGGATTAUAGGUATGUA |
| | UUATUAUAUUUAGUTGATTTTGTATTTTTAGTAGAGAXGGGGTTTUAUUARGTTGTT |
| | UAAGUTGGTUTUAAAUTUUUTGAUUTUAGGTGATUUAUURGUUTTGGUUTUUUAAAG |
| | TGURGGGATTATAGGTGTGAGUUAURGUAUUTGGGUAATTAGTATTGTATTTAAGA |
| | GTTTATATTUATATUUATA |
| 530 | TATGGATATGAATATAAAUTUTTAAATAUAATAUTAATTGUUUAGGTGRGGTGGUTU |
| | AUAUUTATAATUURGGUAUTTTGGGAGGUUAAGGRGGGTGGATUAUUTGAGGTUAG |
| | GAGTTTGAGAUUAGUTTGAAUAARGTGGTGAAAUUUXGTUTUTAUTAAAAATAUAA |
| | AATUAGUTGGGTGTGATGGTGUATGUUTGTAATUUUAGUTAUTTGAGAGGUTGAGG |
| | UAGGAGAATTGUTTGAAUURGGGAGGRGGAGGTTGAAGTGAGUUAAGATTTTGUUA |
| | UTGUAUTUUAGUUTGGGUA |
| 531 | TGTTAUTTUATTGAATTUTUATAATAGUTTAATGUTATRGGTTTTUTTUTTAATTTTG |
| | GGGGUATAGTGGGGAGATAAGUAAAUTGATAUUURGGAGGTTGAGTGAUTUATTUA |
| | TGGAATGUAGUAGGUURGTGAGTUAAAGXGAGTAUATGGUAAGAUXGAGTGAAGU |
| | TGGGGAAUAATAGUUAAGUUAAGAGRGTTTTAAAGATAUTTAGUATUTTUATUAUA |
| | UTGAATUTTTAAGGTGAUAGUAUTTUUAUTRGAUAGUAAAATGTUAGATTUAAUTGT |
| | TTUTTTURGGTUTTUAAAU |
| 532 | GTTTGAAGAURGGAAAGAAAUAGTTGAATUTGAUATTTTGUTGTRGAGTGGAAGTG |
| | UTGTUAUUTTAGGATTUAGTGTGATGAAGATGUTAAGTATUTTTAAAARGUTUTTGG |
| | UTTGGUTATTGTTUUUUAGUTTUAUTXGGTUTTGUUATGTAUTXGUTTTGAUTUARG |
| | GGUUTGUTGUATTUUATGAATGAGTUAUTUAAUUTURGGGGTATUAGTTTGUTTATU |
| | TUUUUAUTATGUUUUUAAAATTAAGAAGAAAAURGATAGUATTAAGUTATTATGAG |
| | AATTUAATGAAGTAAUA |
| 533 | TTAGTATTAUUAAATATRGAGTUAAGGGUUTGATUAGUUUUAAAAGAATGAGGUAU |
| | TTTTAATGTGAUAUUATTUUTGGUAGTUTUAGGTTRGGUTUUUUUAGGUUURGGAT |
| | GUAGATGGUTGTTAGGGGUTGGUUATUUTUATUTUAAXGGTUUTGGAAGGUAUUAU |
| | TTTUAGGGUATATGUUATGAUTAAUATTURGGTGAGUAATGUTGAUTUAATRGTAG |
| | AUTGTTATTTUATGTTUUUAGTAUUUTGTGUAGGAAGGGAAGGGAAATGAGTAATA |
| | GATGTATUAGTUUUATTUAA |
| 534 | TTGAATGGGAUTGATAUATUTATTAUTUATTTUUUTTUUUTTUUTGUAUAGGGTAUT |
| | GGGAAUATGAAATAAUAGTUTARGATTGAGTUAGUATTGUTUAURGGAATGTTAGT |
| | UATGGUATATGUUUTGAAAGTGGTGUUTTUUAGGAUXGTTGAGATGAGGATGGUUA |
| | GUUUUTAAUAGUUATUTGUATURGGGGUUTGGGAGAGURGAAUUTGAGAUTGUUA |
| | GGAATGGTGTUAUATTAAAAGTGUUTUATTUTTTTGGGGUTGATUAGGUUUTTGAUT |
| | RGATATTTGGTAATAUTAA |
| 535 | AGTGGTGGUTGUTGTTTUTRGGTGGUAGAGATGATGUUTGGTTTATTUTTAGTAAAG |
| | TGUTTAGGARGUTGAGUUTGAGGGGUTUTGGAATGGAAAAAUAAAAUAAAAUAAA |
| | AUAAAURGGAGGUURGUTUTGUUTGGUTUUTAGAGAUAXGUAAAGUTGGGUAAAG |
| | GAAGGAGATTGAGGTGGGAUTGAGAUATTGTTGUATTGTGAATGUUURGGTTUUUU |
| | AUUTUUTGUUUUURGAATUATGATTGTTTTATGRGGTTATTTTTUUUTTTGGTGAGG |
| | AAAATGGGATGTGGTGTUAA |
| 536 | TTGAUAUUAUATUUUATTTTUUTUAUUAAAGGGAAAAATAAURGUATAAAAUAATU |
| | ATGATTRGGGGGGUAGGAGGTGGGGAAURGGGGUATTUAUAATGUAAUAATGTUTU |
| | AGTUUUAUUTUAATTTTUUTTUUTTGUUUAGUTTTGXGTGTTUUUTAGGAGUUAG |
| | AGAGRGGGUUTURGGTTTGTTTTGTTTTGTTTTGTTTTTUGATTGGTTGGAAGGTT |
| | GUTUAGRGTUUTAAGUAUTTTAUTAAGAATAAAUUAGGUATUATUTUTGUUAURGA |
| | GAAAUAGUAGUUAUUAUT |
| 537 | GGGGTRGGUATGGGUTGGAGUTUAGAGARGGUUAGUTAGGAUTTUAGGAUAUAUA |
| | GUAAAUTAGUTGRGUUURGUTGAGGGTUAGRGUAUAGURGUUUAUAUAAGGTGTU |
| | UTUTUUURGGGUTUTUTGGGURGURGGUUTUUTGUTTUUXGTGURGUAGAURGGGA |
| | TTAGAUTGTGGARGRGGGGAAGGAAGGGGGRGTTGRGARGGGATUTTGAGGGGAGU |
| | AGGAUTTGUUUUTGUUUUTGRGGRGAAGUTUTAGGUUUTGGUAAGGTTRGGTAUAU |
| | RGGGGGURGUTUUTUUUUAGGG |
| 538 | UUUTGGGGAGGAGRGGUUUURGGTGTAURGAAUUTTGUUAGGGUUTAGAGUTTRG |
| | URGUAGGGGUAGGGGUAAGTUUTGUTUUUUTUAAGATUURGTRGUAARGUUUUUT |
| | TUUTTUUURGRGTUUAUAGTUTAATUURGGTUTGRGGUAXGGGAAGUAGGAGGURG |
| | GRGGUUUAGAGAGUURGGGGAGAGGAUAUUTTGTGTGGGRGGUTGTGRGUTGAUU |
| | UTUAGRGGGGRGUAGUTAGTTTGUTGTGTGTUUTGAAGTUUTAGUTGGURGTUTUTG |
| | AGUTUUAGUUUATGURGAUUUU |
| 539 | GTGUARGUAGGGAAATAUUTUAUAGGGTAAATTTGGATURGATTGAGAAUAGGAAG |
| | UUAUAGGUUAATAUAAGGAGGUTUTGTGAGAAUAGATGAUAAAUUAUAAGURGGG |
| | GAGGGGGAGGAAAGAGUTTTUTGGGUUTGGGGGATGGGXGAGUURGUUAGUAUAU |
| | UAUAUAUAGUTGRGUTTGGUUTUAGTAATUAAAAUUATUATTAUAGAUUTGARGGT |
| | TTGGUTGUAGUTGTAAAGAGATAAGUATGTTGGAAGAGAAAAUAGGGUUURGGTG |
| | AUURGGUUTTAGGGTUTGAGRGU |
| 540 | RGUTUAGAUUUTAAGGURGGGTUAURGGGGUUUTGTTTTUTUTTUUAAUATGUTTA |
| | TUTUTTTAUAGUTGUAGUUAAAURGTUAGGTUTGTAATGATGGTTTTGATTAUTGAG |
| | GUUAAGRGUAGUTGTGTGTGGTGTGUTGGRGGGUTXGUUUATUUUUUAGGUUUAG |
| | AAAGUTUTTTUUTUUUUUTUUURGGUTTGTGGTTTGTUATUTGTTUTUAUAGAGUUT |
| | UUTTGTATTGGUUTGTGGUTTUUTGTTUUUAATRGGATUUAAATTTAUUUTGTGAGG |
| | TATTTUUUTGRGTGUAUA |
| 541 | TGTGRGGGUAGTGGGTTGTGRGGGUAGTGGGTTGTGUATURGGATGTGTAGUAUTU |
| | AUAUAUTTRGGGTGAUTUTTUUTGGGTAAGUTGTGGATGTGAGTGGGGGUAGUATU |
| | TGURGTGAUTUATTUTUTUUTUTTTUUATTUUAAGUXGGGTGGGGGAGTTTGGGATT |
| | TUUAGAUAAGGUUTGGUTUUUUUTGGUAUAGAGGGTGGGAGTGGGGATGGGGAGG |
| | GAGGAGGGAAGGGTUATGGGAAGGTGGGGUUATGTTTTGTGUTUAATGAAUTGAGA |
| | AGGGGGAGGGTTUUAGUTGG |
| 542 | UAGUTGGAAUUUTUUUUUTTUTUAGTTUATTGAGUAUAAAAUATGGUUUUAUUTTU |
| | UUATGAUUUTTUUUUUTUUUTUUUUATUUUUAUTUUUAUUUTUTGTGUUAGGGGG |
| | AGUUAGGUUTTGTUTGGAAATUUUAAAUTUUUUUAUUXGGUTTGGAATGGAAAGA |
| | GGAGAGAATGAGTUARGGUAGATGUTGUUUUUAUTUAUATUUAUAGUTTAUUUAG |
| | GAAGAGTUAUURGAAGTGTGTGAGTGUTAUAUATURGGATGUAUAAUUUAUTGUU |
| | RGUAUAAUUUAUTGUURGUAUAA |
| 543 | GUAAUTGGRGUTGGGTAGGUAAAGURGGGAGAAAUTGUTGAGARGAGGTTAGGAT |
| | TTAAUUTTTAAATTUTGGAGUUATRGGAAAURGAGGGGAGGARGARGGGTGTRGGT |
| | GUTAATGAGGUTGGGGGRGGGRGATGRGRGGTGGGUUTUXGAGTURGGGGUAGGT |
| | UTRGGGGGTTUUURGGGGAAGGUUUTGGGAGUUUTTGGUUUTGGRGGUUTURGUU |
| | ATUAGAUTGGGAATGTUTUTGATTGGGTGGUUAGGAGGRGGTGGUUUTUUTUUURG |
| | UUUAGUTGAGGGGTGTRGTUTTU |
| 544 | GAAGARGAUAUUUUTUAGUTGGGRGGGGAGGAGGGUUAURGUUTUUTGGUUAUUU |
| | AATUAGAGAUATTUUUAGTUTGATGGRGGAGGURGUUAGGGUUAAGGGUTUUUAG |
| | GGUUTTUUURGGGGAAUUUURGAGAUUTGUUURGGAUTXGGAGGUUUAURGRGUA |
| | TRGUURGUUUUUAGUUTUATTAGUAURGAUAUURGTRGTUUTUUUUTRGGTTTURG |
| | ATGGUTUUAGAATTTAAAGGTTAAATUUTAAUUTRGTUTUAGUAGTTTUTUURGGUT |
| | TTGUUTAUUUAGRGUUAGTTGU |
| 545 | GGGUAUUUTUTGGTGUTTUUAGGUUTGTGAATTGGUAUAGUAGGAUUAUAGAUUT |
| | UUAAGGTGUUUAUUTGGGGGUTUAGAAUUUTGGRGGGGAAGGTUAGTGUTATUUU |
| | AURGGAGAAGAGAUUTAGTUTAGUTGAGUUUUTGGUUAGXGGUAAGGAGGAAAGG |
| | ATGAAUATUAGUUARGUUTGGUAUTGAUTGUUAUAGUUAGAGUUTRGUUUAGUUU |
| | AAGAATGTTTUTGTTUTAAGAUTTTTTTUTTTTTTGTATTTTAGAGAAGTTUUU |
| | AAATGTUAUUTTGAAGAUURGG |
| 546 | URGGGTUTTUAAGGTGAUATTTGUUTGTGATAATTTUTAAAATAUAAAAAAGAAAA |
| | AAGTUTTAGAAUAGAAAUATTUTTGGGUTGGGRGAGGUTUTGGUTGTGGUAGTUAG |
| | TGUUAGGRGTGGUTGATGTTUATUUUTTUUTTTTTTGUXGUTGGUUAGGGGUTUAGU |
| | TAGAUTAGGTUTUTTUTURGGTGGGATAGUAUTGAUUTTUUURGUUAGGGTTUTGA |
| | GUUUUUAGGTGGGUAUUTTGGAGGTUTGTGGTUUTGUTGTGUUAATTUAUAGGUUT |
| | GGAAGUAUUAGAGGGTGUUU |
| 547 | UTUATGGAGAGGAGUAGAGATGUAGGAAARGUAAUAGUAGUARGGUAGAAARGUA |
| | GGAGAAAUAGUUURGUUTUAGAGURGUUUAUUTUUTUURGUUATGUUAGGAAGGG |
| | UUAGTGTUUUTUUAGARGURGGTGAUTGTUARGTUAGAUAXGTGARGTGTGGUTGT |
| | GUUUAGATTUTTGGRGGTGAGUUURGGRGAGGGAUUUAGRGGTUTUURGGRGTUTG |
| | GTTTAGGGGGGGATUTURGUAAGAUUURGUURGUARGTGGUTUUTGTGAGGGGUAU |
| | TGRGRGRGAAGGUTGTGGTUTG |
| 548 | UAGAUUAUAGUUTTRGRGRGUAGTGUUUUTUAUAGGAGUUARGTGRGGGRGGGGT |
| | UTTGRGGAGATUUUUUUUTAAAUUAGARGURGGGAGAURGUTGGGTUUUTRGURG |
| | GGGUTUAURGUUAAGAATUTGGGUAUAGUUAUARGTUAXGTGTUTGARGTGAUAG |
| | TUAURGGRGTUTGGAGGGAUAUTGGUUUTTUUTGGUATGGRGGGAGGAGGTGGGRG |
| | GUTUTGAGGRGGGGUTGTTTUTUUTGRGTTTUTGURGTGUTGUTGTTGRGTTTU |
| | UATUTUTGUTUUTUTUUATGAG |
| 549 | UTUTUUAUTGTGUAGGUUAUUTGTAGGGAUAGTGUUAGTGGGTGTAGGAGAGGTGG |
| | RGAGGUTGUAGUAGTGRGGGATGGGUTUUUUAUAUUUUUAAATAUTUUAUATGGG |
| | GTURGGGGUUTTUUUAGGAUUTGGGUUAGGTGXGUAXGUUTGGGXGGGGUUAGUU |
| | AGUTRGTGUTGAGTUAURGGGTGURGTUAGTGAGGGUUTGGUUUUAUUUTRGGGAA |
| | UUAURGGTGUTGGTTTTUUUARGGUTGUTGUURGUTGTGGGUUTTGUTGTUAUUUA |
| | UAAGGUUUTGGGAGGUUUTGUU |
| 550 | GGUAGGGUUTUUUAGGGUUTTGTGGGTGAUAGUAAGGUUUAUAGRGGGUAGUA |
| | GURGTGGGAAAAUUAGUAURGGTGGTTUURGAGGGTGGGGUUAGGUUUTUAUTG |
| | ARGGUAUURGGTGAUTUAGUARGAGUTGGUTGGUUUXGUUUAGGXGTGXGUAU |
| | UTGGUUUAGGTUUTGGGAAGGUUURGGAUUUUATGTGGAGTATTTGGGGGTGTG |
| | GGGAGUUUATUURGUAUTGUTGUAGUUTRGUUAUUTUTUUTAUAUUUAUTGGUA |
| | UTGTUUUTAUAGGTGGUUTGUAUAGTGGAGAG |

[0146] Also provided herein is a deoxyribonucleic acid identical to 5-10, 10-20, 20-30, 30-40, 40-50, 50-60, 60-70, 70-80, 80-90, 90-100, 100-110, 110-120, 120-130, 130-140, 140-150, 150-160, 160-170, 170-180, 180-190, or 190-200 of contiguous nucleotide sequence of the sequence including a sequence of SEQ ID NO:1 to SEQ ID NO: 550.

[0147] In embodiments, provided herein is a deoxyribonucleic acid which includes a methylation site set forth in Table 1.

[0148] In embodiments, included herein is a deoxyribonucleic acid in which a plurality of methylation sites set forth in Table 1 are methylated or unmethylated. In embodiments, the plurality of methylation sites comprises at least about 1, 2, 3, 4, 5, 6, 7, 8, 9, 10, 15, 20, 25, 50, 75, 100, 150, 200, 250, 300, 350, 400, 450, 500, or 550 methylation sites. In embodiments, the plurality of methylation sites comprises between 1-50, 50-100, 100-250, 100-300, 100-400, 100-500, 100-550, 250-550, or 350-500 methylation sites.

### Compositions for Detecting Methylation

[0149] Also provided herein are probes and primers that are complementary to one or more of SEQ ID NOS: 1-550. In embodiments, pairs of primers complementary to nucleotide sequences on either side of a methylation site of interest listed in Table 1 are provided. In embodiments, a plurality of probes and/or primers are provided to detect and/or amplify a polynucleotide (e.g., a polynucleotide obtained by bisulfite treatment of DNA) comprising a methylation site of interest. In embodiments, a probe or primer is complementary to a polynucleotide sequence that encompasses the methylation site of interest. In embodiments, the probe or primer is complementary to a sequence that is proximal to the methylation site of interest (e.g., within 1000, 900, 800, 700, 600, 500, 400, 300, 200, 100, 75, 50, or 25 nucleotides of the methylation site of interest in a genomic or bisulfite-treatment-derived polynucleotide).

[0150] In embodiments, a deoxyribonucleic acid selected from SEQ ID NO:551 to SEQ ID NO: 782 is included. In embodiments, the deoxyribonucleic acid selected from SEQ ID NO:551 to SEQ ID NO: 782 is hybridized to a complementary DNA sequence having uridine or cytosine. In embodiments, each of the nucleic acids is different. In embodiments, each of the nucleic acids does not simultaneously have the same sequence selected from SEQ ID NO:551 to SEQ ID NO:782.

[0151] In embodiments, aspects include a deoxyribonucleic acid selected from SEQ ID NO:551 to SEQ ID NO:782, hybridized to corresponding a complementary DNA sequence having uridine or cytosine, and in a complex with an enzyme, e.g., a thermostable DNA polymerase. In embodiments, the thermostable DNA polymerase is Taq DNA polymerase.

[0152] In some aspects, the method includes deoxyribonucleic acid that has a sequence that is at least 50%-55%, 55%-60%, 60%-65%, 65%-70%, 70%-75%, 75%-80%, 80%-85%, 90%, 91%, 92%, 93%, 94%, 95%, 96%, 97%, 98%, 99% or more identical or homologous to a nucleic acid having a sequence of at least one of SEQ ID NO:551 to SEQ ID NO:782.

TABLE 5

| SEQ ID NO: | Sequence, 5′ to 3′ |
|---|---|
| 551 | GGGAGAAGAGATTGGAAAA |
| 552 | CTAAAAACCTAACACTAACAACATAAT |
| 553 | TGTTGTTTAAAATGTTGTTT |
| 554 | AACCCTAAATAATTCTTCTC |
| 555 | GGGTTGGGTTGAGGTTTT |
| 556 | ACACCTTACATCTCATTTACAACTC |
| 557 | AATTTGTGAAAAGTTTGTGTA |
| 558 | CCCAATCACCTTTAATCT |
| 559 | GTTGGGATTTGAAATAGTGA |
| 560 | CCTCCACTCACCTAAAACTT |
| 561 | TTGGTTAGTGATTATTTATT |
| 562 | AAAAATTAATATAAAATTAAAA |
| 563 | TTTGTAGGGAGTTAGGGAT |
| 564 | TCCTCTATCTCACCCTAAAT |
| 565 | TTTGATTGAATTATTTGTGTATT |
| 566 | ACTCCCTTACTCCTAAACACT |
| 567 | AGTGGAGATEGGTAGGGAGA |
| 568 | CCCAAAACTAAAACCAAATATAA |
| 569 | TTGTGGTTAAATTTATTG |
| 570 | ACCCAACAAAATAATATC |
| 571 | TGAGGTAGAGTTGTGTGTATAT |
| 572 | ATCAATCAATTCTCATTAAAC |
| 573 | GGAAGTTAGGAAGGGTTGT |
| 574 | CTCCAACTCCAACTAAAACTC |
| 575 | TTEGGGTATTGATTTATTTT |
| 576 | AAATTCTACCTACAAACTATACA |
| 577 | AGGATGAAGTAATAATTAAATATTG |
| 578 | CCCACTCTACCAACTAAAC |
| 579 | AGGTTTGTGTTAGTATAAAT |
| 580 | TTCTTACCTATATAATTAATAATA |
| 581 | GTTGGGTGAATTTTATTAG |
| 582 | TCAAAACCTAAACTCTAACA |
| 583 | GGATTGGTTTRATATAGAAAGTAT |
| 584 | CAAATAATAAATCATAACTCTTAACT |
| 585 | TGGGGTAGTTGATGGTTT |
| 586 | CTTTCTAACAAAATAAAAAAATTTAA |
| 587 | TTGTATTTGAAGTTTGTAGAGATTTATA |
| 588 | TTTCCTCCAACAACTCAAT |
| 589 | TTATGAGTATGTAGTAGGGTTATTATA |
| 590 | AAAATATCAAACAAATTTATCC |
| 591 | TGGTTGTTTGTTTTTTATGTATT |
| 592 | TCCCTACCTCCCAAATTC |
| 593 | TATGATGATTGTTGTAGTGTAGA |
| 594 | CCTCCCTAATAACTAAAAATAC |
| 595 | GGTGGTTTTGATATTTAGTG |
| 596 | CCCAATTACCTAACAAATTA |
| 597 | TGGGATAGGTGTAGATATG |
| 598 | CAACAAAAACTAAAACACTATAC |
| 599 | TTTGGGATTGGTTATTTT |
| 600 | AAACCCCTTAACTCTATACC |
| 601 | GATTTTTTTGAGAAGAGTATAG |
| 602 | AACCACTACCACCTAAATATA |
| 603 | GGAGGATAGGGTGTGATT |
| 604 | ACATTTTTAACTCTAACTAAAAATAAA |
| 605 | TGGAAATGAGGTGAGTTT |
| 606 | AAAAAAAAATAAAATAACAATAACTA |
| 607 | TGGAGAGTTTAGTTTGTTT |
| 608 | CAAAAAAAAATCTAACAAC |
| 609 | TGGGTTTTAGTTATGTGGTT |
| 610 | ATCAATAATATCCAACAAAATAATAT |
| 611 | TTTTTTTAGTTTTTGTATATATATTAG |
| 612 | ACCCAAATAATCAACTCTT |
| 613 | GTGGTTTTTGGAGATTTA |
| 614 | AAACAAACTACAAATAAAATAATAC |
| 615 | GGGTTATAGGTTTGAGTTA |
| 616 | CCATTAAAAAAAATAAAATC |
| 617 | TTGGTAGATTTAGTAAATTTATT |
| 618 | AAACTTAAACAACCCTATATAC |
| 619 | ATGGTTTTAAAGAGTAGTAGTATAGTT |
| 620 | AAATTTACTCATCCCACTTC |
| 621 | AGGGGTTGGGATATTGTT |
| 622 | AAAAATTTCTCCTTACAAAAAACTAA |
| 623 | ATGGGTGTTTGGAATTTTTTA |
| 624 | CTACCTCAACCTCCTAAATAACTAA |
| 625 | GTGTTTTGTGGTANAGATATAG |
| 626 | ATTCTTAAATTAATTCAACTACAT |
| 627 | TGGGGGTAAAAGTTATAGTT |
| 628 | AAAAAACAAAAAACCAAATAC |
| 629 | GTTTTTTGGTTAGTGTGTT |
| 630 | CCCCATACTTCTATACTATAAT |
| 631 | TTGTTGTTTTTAAAGAAATTATA |
| 632 | ATCATCTAAACTTAACTCATCTAA |
| 633 | ATTTTTGGGTGTTTTATATT |
| 634 | AAACCTCAAACAATAACA |
| 635 | ATTAAGGATATTTAGGAGAGTAAG |
| 636 | ACACCACAACTTCAAACTAC |
| 637 | TGAGGAAGAGAGAAGAGATGATA |
| 638 | AAAACTAAACTATAAAACAAAACAAAACTA |
| 639 | GGTGGAGGTGTTTTTTATAG |
| 640 | CCAAATACTACTTTCAAAATACA |
| 641 | ATGGATTATTATTGTGTTATT |
| 642 | CATCTCAACCTCATACTAA |
| 643 | GGATGATTTAGTAGGGATTGAG |
| 644 | ccAAATAAAAACCATTCTCTAAC |
| 645 | TTGGATTAAGTATTTTTGATATTA |
| 646 | TCCCTAAACCATATATTACTAAA |
| 647 | GGGTAGTTTGGTGATTATTATT |
| 648 | CCCTTCCCTACTCACAATA |
| 649 | ATTTGGTTAGTGATTTAGTTATT |
| 650 | TCCCACTTAAAAAATTCTATA |
| 651 | AGTGGGGAAGGTAATTGTTAT |
| 652 | CTTTCTAATAAAAATTTACTAAAACCTCTA |
| 653 | TTTGGTTAGTTTTATTTTTGATTG |
| 654 | ATTCCTCCCTATCCCTATTC |
| 655 | GGGATAGGGGTTAGAGTAA |
| 656 | TCCATAAAAACAAAACACTC |
| 657 | TTTTTTAGTATGAGTTATAAATTAT |
| 658 | AAAACAAAATCTACCTATATATT |
| 659 | TTTTATTAATAAAGTAGGTATGA |
| 660 | ACCTTTCTCAAAATTACTAA |
| 661 | ATAGGGTTGAGGTTAGAGTTAT |
| 662 | CCTCCTCTCCACAATAAA |
| 663 | TTTAAGTTTTTTTTTAGTTTTGTAGT |
| 664 | CCCCATCCTCTCTATCTC |
| 665 | AAATTTAAAATTTAGAGGTTTTTATA |
| 666 | AAACTTCACACACAAATCTATATT |
| 667 | TTTTTATTTTATTTTTTATTTTTAA |
| 668 | ATACCTCCCTAATTATATTATTAA |
| 669 | TTTTAGAATATTTAAAGAAGTTAGT |
| 670 | TAACCTCACTTTCCTATCA |
| 671 | AATTTAGTATAAGATTTGATTTGTTA |
| 672 | CCACCTACTCCTTCCTATAC |
| 673 | TTTTTTGAAATTGTATGTTAT |
| 674 | CAAATCCTTAAAATTCTATAA |
| 675 | TTTGAAGTGGTGTTTTAG |
| 676 | CCAAAATTCTTCCATACT |
| 677 | TGGGTATTTAGTYTTTTGTG |
| 678 | AACAAcTACCTCCTTTTACTAAT |
| 679 | TATGGTAGGAGGTGGAGTT |
| 680 | CCCAATTTTAAAACAATAC |
| 681 | AGAGGAAGTAAGGTTATTAGTT |
| 682 | ACCAAACAAACAATATCTAA |
| 683 | GGTTTTAATTATGATTTAATTAGA |
| 684 | CCTACACTCAAATTTACCTCTA |
| 685 | AATGGGTAGTTGATATAATTATT |
| 686 | CACAAAATCCTAAAACTAAAA |
| 687 | AGGATTAGTGGAAATGAAAATA |
| 688 | TAACCTCAAAACAACTTCTAAAC |
| 689 | TTTTTTTTATAGAGAAGTATTTTAG |
| 690 | CCCATTACAAAACTATCC |
| 691 | GGTGAGTTTGTGGTTAGTG |
| 692 | TTTTCTAAAAAAATCCAATCTA |
| 693 | AATGGATAGGTTGGAATAG |
| 694 | AAAAAAAAAAAAAAACTAATTAC |
| 695 | GAGTTATTTAGTTTGGTTAGGT |
| 696 | ACTCAACTTAAAAAATCACTATAC |
| 697 | TTTYTTTTGGYTTTTTGGYTTT |
| 698 | TCCCCCACACCCATATAA |
| 699 | TTAAAAAAAAGTATAATGAGTAGGA |
| 700 | CCCACAAAAACTCTCTACA |
| 701 | AAAGGAGGTTGAGTTAGAAAGTAG |
| 702 | AACTATTTAACTTACTTAACCACACC |
| 703 | GGTGTGGTTAAGTAAGTTAAATAGT |
| 704 | TACCCCTTCCTCTTCAAC |
| 705 | TTTTGATATGATTTATGATTATAT |
| 706 | TTTTCCACTAAACAACACTA |
| 707 | TTTGAGGGTTGTTTTAGAT |
| 708 | ACTCACAAAAAATAACTAATAACTAT |
| 709 | AAAGGAGGTAGGGGAGATATA |
| 710 | TCAAAATAAAAACCAAAATTCTC |
| 711 | AGGTTAAGTTGGTAGAGGTAGA |
| 712 | CAAACTCTAAACTCAAAATATATTC |
| 713 | TTTTTATTTTAGTTTTTTTGAGTAG |
| 714 | CCCTACAACACTCCTATCTA |
| 715 | TTTGGAGTTAGGTTGATAG |
| 716 | CAACAATACTCTCACTTACAC |
| 717 | AGAAAGATTTTTAAATATTTTTAAT |
| 718 | AAACCTCTAATACACAACAAA |
| 719 | TTTTGAGTTTTTTTTTTTTAAGTAT |
| 720 | CAAACAAAACAACACTTAATAC |
| 721 | GGTTGAGGTGGGTGGATTA |
| 722 | TTTTTTTTTTTTTTTTTTAAAATAAAATCT |
| 723 | GGGTGTTTGTAATTTTAGTT |
| 724 | ACCTETTAACAACCTAACAATATA |
| 725 | GGGTAGATGATATGGTAGTGA |
| 726 | AAAAAATAAAAAATAACTAAAACAATAT |
| 727 | AGGAAGTGTTTAAGAAGTAGAA |
| 728 | CCTAAAACTCTAAATACAATCTC |
| 729 | TTTTTAATTTTTGTTTGTATT |
| 730 | AAACCACAATCTATTTCTAA |
| 731 | TTAGAAAAGAATAATTATAGTTG |
| 732 | ACCCTAAAAAAATAAAATC |
| 733 | TTGTATTAGTAAATAAAGTGTATTTT |
| 734 | AACCCTTTCTACAAATCTAC |
| 735 | AGGGGTGGGTGGAAGAAT |
| 736 | CTCCTCAATAAAATAAAAATCCTAAAAAATA |
| 737 | GGGTTAATTAGTTGTTTTAT |
| 738 | CCTACAAATATATCACACACT |
| 739 | TTTGTTAAATAGGTGGTTAGA |
| 740 | ACCTCAACCTCCTAAATAAC |
| 741 | TAGGGTTTAGAGTAGGAGGTAG |
| 742 | CAAAAAATATAAATCAAAAACATC |
| 743 | GGGATTATAGGTATTTATTAT |
| 744 | TAAAAATTAAAAATCATACTTA |
| 745 | AAGTGATTTTTAGGGAGTGT |
| 746 | TCCATAATAACCTCATTTTAATA |
| 747 | TTTTTGGTTGAGGTTTAGT |
| 748 | AAACAACACAACTCTTATCAC |
| 749 | TATGGTGATTAAAGTATAATAGTT |
| 750 | TCCTAAATAAAAAACAACATA |
| 751 | TGAAAATGTTTTTAGTTTTTATT |
| 752 | AAATACCCTACCTCTTATCTAA |
| 753 | GATGGTTAATTTTTTTATTT |
| 754 | ACTCCTTCAACAAACTAAC |
| 755 | AGGGGATATTTTTAGGTT |
| 756 | CCAATCTATTCCTATATAATTAA |
| 757 | AGGAGAGTTTGGAAATATAG |
| 758 | CAATTCTAAATTAAACCTTATT |
| 759 | AATAATGGTAGTAGTTTTATTAG |
| 760 | TTCCTATATTAACAACTTACA |
| 761 | TTTTTTGGTAGATTTTTAT |
| 762 | AAATTAATTTCTATTATTTATATTA |
| 763 | AGGTGGTTGGGGAGAGTG |
| 764 | CCCTAAAATAAATCAAAAAAAACCTTAA |
| 765 | AGGTTTAGGTGGGGTGAAT |
| 766 | TAAAATCATCAAAATCCCTTAAAA |
| 767 | TTTTTTTTTAGGTTATACTGAGTATT |
| 768 | ATCCCCACAAAACACATA |
| 769 | TAGGGTAAATATTGGGATTATT |
| 770 | TTTCCACCTCAAAACTTAAC |
| 771 | GGGTGTTTGTATTTTTATATT |
| 772 | ACCTCCCAAAACCATAAC |
| 773 | GATGTGAGTGGTGAGGTGGT |
| 774 | CAAACCCTTCCAAAACATAAAC |
| 775 | TGGGATTATAGGTATGTATT |
| 776 | CAATTTCATTTATAAATATAAATAT |
| 777 | AGGGGTTGGTTATTTTTATTTT |
| 778 | TTTTTAATATTTAATTTTTACCTTCAACT |
| 779 | GGTAAGTTGTGGATGTGAGT |
| 780 | AAAAAAAACCAAACCTTATCTA |
| 781 | TTTTTAGGATTTGGGTTAG |
| 782 | AACCTTATAAATAACAACAAAAC |

### Kit for Detecting Methylation Level of a Thyroid Nodule

[0153] Also provided is a kit including a plurality (e.g., at least about 10, 20, 40, 50, 100, 150, 200, 225, or 232) nucleic acids each independently comprising one sequence selected from SEQ ID NO:551 to SEQ ID NO:782, in which the nucleic acids do not simultaneously include the same sequence.

[0154] In some aspects, the kit includes deoxyribonucleic acid that has a sequence that is at least 50%-55%, 55%-60%, 60%-65%, 65%-70%, 70%-75%, 75%-80%, 80%-85%, 90%, 91%, 92%, 93%, 94%, 95%, 96%, 97%, 98%, 99% or more identical or homologous to a nucleic acid having a sequence of at least one of SEQ ID NO:551 to SEQ ID NO:782.

[0155] The kit provided herein may include enzymes, reagents for deamination of cytosine, buffers, vials, plasmid vectors, control DNA, devices for collecting thyroid tissue samples, reagents for isolating DNA, reagents for labeling DNA, labels, or any combinations thereof.

[0156] The kit provided herein may include enzymes such as thermostable DNA polymerase enzymes, restriction enzymes, and combination thereof.

[0157] In embodiments, the kit(s) may further include enzymes, reagents for deamination of cytosine, buffers, vials, control DNA, devices for collecting blood and/or tissue samples, or reagents for labeling DNA, or any combinations thereof.

[0158] In embodiments, a kit provided herein may include a solid carrier capable of adsorbing the nucleic acids containing in a sample of a body fluid, for example blood (whole blood, plasma, or serum). The kit may also contain other components for example, reagents, in concentrated or final dilution form, chromatographic materials for the separation of the nucleic acids, aqueous solutions (buffers, optionally also in concentrated form for final adjusting by the user) or chromatographic materials for desalting nucleic acids which have been eluted with sodium chloride.

[0159] In embodiments, a kit provided herein includes materials for purifying nucleic acids, for example, inorganic and/or organic carriers and optionally solutions, excipients and/or accessories. Such agents are known and are commercially available. For solid phase nucleic acid isolation methods, many solid supports have been used including membrane filters, magnetic beads, metal oxides, and latex particles.

[0160] In addition, a kit can also contain excipients such as, for example, a protease such as proteinase K, or enzymes and other agents for manipulating nucleic acids, e.g., at least one amplification primer, nucleic acid bases (A, T, G, C, and/or U), and enzymes suitable for amplifying nucleic acids, e.g., DNase, a nucleic acid polymerase and/or at least one restriction endonuclease. Alternatively, a commercial polymerase chain reaction kit may be used to amplify the DNA samples.

### Exemplary Techniques for Detecting Specific Sequences

[0161] Specific sequences, such as the sequences listed in Table 1 (or portions thereof containing a methylation site of interest), can be detected by numerous methods that are well-established in the art (e.g., PCR-based sequence specific amplification, isozyme markers, northern analysis, sequence specific hybridization, and array based hybridization). In embodiments, the presence or absence of methylation is determined through nucleotide sequencing of the site of interest (e.g., the site in bisulfite-treated DNA or an amplicon thereof). Any of these methods are readily adapted to high throughput analysis.

[0162] Some techniques for detecting specific sequences utilize hybridization of a probe nucleic acid to nucleic acids corresponding to the methylation site of interest (e.g., amplified nucleic acids produced using bisulfite-treated DNA as a template or the bisulfite-treated DNA itself). Hybridization formats, including, but not limited to: solution phase, solid phase, mixed phase, or in situ hybridization assays are useful for sequence detection. A non-limiting guide to the hybridization of nucleic acids is found in Tijssen (1993) Laboratory Techniques in Biochemistry and Molecular Biology—Hybridization with Nucleic Acid Probes Elsevier, N.Y., as well as in Sambrook, Berger and Ausubel.

[0163] Nucleic acid probes complementary to a methylation site can be cloned and/or synthesized. Any suitable label can be used with a probe. Detectable labels suitable for use with nucleic acid probes include, for example, any composition detectable by spectroscopic, radioisotopic, photochemical, biochemical, immunochemical, electrical, optical or chemical means. Useful labels include biotin for staining with labeled streptavidin conjugate, magnetic beads, fluorescent dyes, radiolabels, enzymes, and colorimetric labels. Other labels include ligands which bind to antibodies labeled with fluorophores, chemiluminescent agents, and enzymes. A probe can also constitute radiolabelled PCR primers that are used to generate a radiolabelled amplicon. Labeling strategies for labeling nucleic acids and corresponding detection strategies can be found, e.g., in Haugland (2003) Handbook of Probes and Research Chemicals Ninth Edition by Molecular Probes, Inc. (Eugene Oreg.). Additional non-limiting details regarding sequence detection strategies are found below.

[0164] PCR, RT-PCR and LCR are in particularly broad use as amplification and amplification-detection methods for amplifying nucleic acids (e.g., those comprising a methylation site), facilitating detection of the nucleic acids of interest.

[0165] In embodiments, real time PCR or LCR is performed on the amplification mixtures described herein, e.g., using molecular beacons or TaqMan™ probes. A molecular beacon (MB) is an oligonucleotide or peptide nucleic acid (PNA) which, under appropriate hybridization conditions, self-hybridizes to form a stem and loop structure. The MB has a label and a quencher at the termini of the oligonucleotide or PNA; thus, under conditions that permit intra-molecular hybridization, the label is typically quenched (or at least altered in its fluorescence) by the quencher. Under conditions where the MB does not display intra-molecular hybridization (e.g., when bound to a target nucleic acid, e.g., to a region of an amplicon during amplification), the MB label is unquenched. Details regarding standard methods of making and using MBs are well established in the literature and MBs are available from a number of commercial reagent sources. See also, e.g., Leone et al. (1995) “Molecular beacon probes combined with amplification by NASBA enable homogenous real-time detection of RNA.” Nucleic Acids Res. 26:2150-2155; Tyagi and Kramer (1996) “Molecular beacons: probes that fluoresce upon hybridization” Nature Biotechnology 14:303-308; Blok and Kramer (1997) “Amplifiable hybridization probes containing a molecular switch” Mol Cell Probes 11:187-194; Hsuih et al. (1997) “Novel, ligation-dependent PCR assay for detection of hepatitis C in serum” J Clin Microbiol 34:501-507; Kostrikis et al. (1998) “Molecular beacons: spectral genotyping of human alleles” Science 279:1228-1229; Sokol et al. (1998) “Real time detection of DNA:RNA hybridization in living cells” Proc. Natl. Acad. Sci. U.S.A. 95:11538-11543; Tyagi et al. (1998) “Multicolor molecular beacons for allele discrimination” Nature Biotechnology 16:49-53; Bonnet et al. (1999) “Thermodynamic basis of the chemical specificity of structured DNA probes” Proc. Natl. Acad. Sci. U.S.A. 96:6171-6176; Fang et al. (1999) “Designing a novel molecular beacon for surface-immobilized DNA hybridization studies” J. Am. Chem. Soc. 121:2921-2922; Marras et al. (1999) “Multiplex detection of single-nucleotide variation using molecular beacons” Genet. Anal. Biomol. Eng. 14:151-156; and Vet et al. (1999) “Multiplex detection of four pathogenic retroviruses using molecular beacons” Proc. Natl. Acad. Sci. U.S.A. 96:6394-6399. Additional details regarding MB construction and use is found in the patent literature, e.g., U.S. Pat. No. 5,925,517 (Jul. 20, 1999) to Tyagi et al. entitled “Detectably labeled dual conformation oligonucleotide probes, assays and kits;” U.S. Pat. No. 6,150,097 to Tyagi et al (Nov. 21, 2000) entitled “Nucleic acid detection probes having non-FRET fluorescence quenching and kits and assays including such probes” and U.S. Pat. No. 6,037,130 to Tyagi et al (Mar. 14, 2000), entitled “Wavelength-shifting probes and primers and their use in assays and kits.”

[0166] PCR detection and quantification using dual-labeled fluorogenic oligonucleotide probes, commonly referred to as “TaqMan™” probes, can also be performed. These probes are composed of short (e.g., 20-25 base) oligodeoxynucleotides that are labeled with two different fluorescent dyes. On the 5′ terminus of each probe is a reporter dye, and on the 3′ terminus of each probe a quenching dye is found. The oligonucleotide probe sequence is complementary to an internal target sequence present in a PCR amplicon. When the probe is intact, energy transfer occurs between the two fluorophores and emission from the reporter is quenched by the quencher by FRET. During the extension phase of PCR, the probe is cleaved by 5′ nuclease activity of the polymerase used in the reaction, thereby releasing the reporter from the oligonucleotide-quencher and producing an increase in reporter emission intensity. Accordingly, TaqMan™ probes are oligonucleotides that have a label and a quencher, where the label is released during amplification by the exonuclease action of the polymerase used in amplification. This provides a real time measure of amplification during synthesis. A variety of TaqMan™ reagents are commercially available, e.g., from Applied Biosystems (Division Headquarters in Foster City, Calif.) as well as from a variety of specialty vendors such as Biosearch Technologies (e.g., black hole quencher probes). Further details regarding dual-label probe strategies can be found, e.g., in WO92/02638.

[0167] Other similar methods include e.g. fluorescence resonance energy transfer between two adjacently hybridized probes, e.g., using the “LightCycler™” format described in U.S. Pat. No. 6,174,670.

### Amplification and Sequencing Primers

[0168] In embodiments, methylation sites are detected using primers, e.g., to amplify and/or sequence polynucleotides comprising the methylation sites.

[0169] Suitable primers can be designed and is not intended that the present subject matter be limited to any particular primer or primer pair. For example, primers can be designed using any suitable software program, such as LASERGENE™, e.g., taking account of publicly available sequence information. Flanking sequences for the methylation sites identified herein are publicly available; accordingly, suitable amplification primers can be constructed based on well understood base-pairing rules. The sequence of any amplicon can be detected as has already been discussed above, e.g., by sequencing, hybridization, array hybridization, PCR, LCR, or the like.

[0170] In embodiments, the primers are radiolabelled, or labeled by any suitable means (e.g., using a non-radioactive fluorescent tag), to allow for rapid visualization of differently sized amplicons following an amplification reaction without any additional labeling step or visualization step. In embodiments, the primers are not labeled, and the amplicons are visualized following their size resolution, e.g., following agarose or acrylamide gel electrophoresis. In embodiments, ethidium bromide staining of the PCR amplicons following size resolution allows visualization of the different size amplicons.

[0171] It is not intended that the primers be limited to generating an amplicon of any particular size. The primers can generate an amplicon of any suitable length for detection (e.g., by sequencing or hybridization). In embodiments, amplification produces an amplicon at least 20 nucleotides in length, or alternatively, at least 50 nucleotides in length, or alternatively, at least 100 nucleotides in length, or alternatively, at least 200 nucleotides in length. Amplicons of any size can be detected and/or sequenced using various technologies described herein and known in the art.

### Detection of Methylation Levels Using Sequencing

[0172] Sequencing is the process of determining the precise order of nucleotides within a DNA molecule. The advent of rapid DNA sequencing methods has greatly accelerated biological and medical research and discovery. Non-limiting examples and descriptions are provided below. However, embodiments are not limited to the use of a particular sequencing assay, technology, or approach.

[0173] Sanger sequencing is a method of DNA sequencing based on the selective incorporation of chain-terminating dideoxynucleotides by DNA polymerase during in vitro DNA replication (Sanger F; Coulson A R (May 1975) J. Mol. Biol. 94 (3): 441-8; Sanger et al. (December 1977) Proc. Natl. Acad. Sci. U.S.A. 74 (12): 5463-7).

[0174] In embodiments, next-generation sequencing is used. Non-limiting examples of next-generation sequencing methods include massively parallel signature sequencing (MPSS), single-molecule real-time sequencing, ion semiconductor sequencing, pyrosequencing, sequencing by synthesis, sequencing by ligation, chain termination, DNA nanoball sequencing, helicos single molecule sequencing, single molecule real time sequencing, nanopore DNA sequencing, tunnelling currents DNA sequencing, and sequencing by hybridization.

[0175] Many commercially available sequencing technologies, devices, and services are available. In embodiments, an Illumina sequencer is used. In embodiments, PCR products are ligated with a linker and sequenced using a high throughput sequencer, such as an Illumina sequencer. In embodiments, the ligation step can be avoided, omitted, or eliminated by adding a linker to amplification primers.

### Array-Based Sequence Detection

[0176] Array-based detection can be performed using commercially available arrays, e.g., from Affymetrix (Santa Clara, Calif.) or other manufacturers. Reviews regarding the operation of nucleic acid arrays include Sapolsky et al. (1999) “High-throughput polymorphism screening and genotyping with high-density oligonucleotide arrays.” Genetic Analysis: Biomolecular Engineering 14:187-192; Lockhart (1998) “Mutant yeast on drugs” Nature Medicine 4:1235-1236; Fodor (1997) “Genes, Chips and the Human Genome.” FASEB Journal 11:A879; Fodor (1997) “Massively Parallel Genomics.” Science 277: 393-395; and Chee et al. (1996) “Accessing Genetic Information with High-Density DNA Arrays.” Science 274:610-614.

[0177] A variety of probe arrays have been described in the literature and can be used for detection of methylation. For example, DNA probe array chips or larger DNA probe array wafers (from which individual chips would otherwise be obtained by breaking up the wafer) may be used in embodiments described herein. DNA probe array wafers generally comprise glass wafers on which high density arrays of DNA probes (short segments of DNA) have been placed. Each of these wafers can hold, for example, approximately 60 million DNA probes that are used to recognize longer sample DNA sequences (e.g., from individuals or populations, e.g., that comprise methylation sites of interest). The recognition of sample DNA by the set of DNA probes on the glass wafer takes place through DNA hybridization. When a DNA sample hybridizes with an array of DNA probes, the sample binds to those probes that are complementary to the sample DNA sequence. By evaluating to which probes the sample DNA for an individual hybridizes more strongly, it is possible to determine whether a known sequence of nucleic acid is present or not in the sample, thereby determining whether a uracil, thymine, or cytosine is present at a polynucleotide site corresponding to a genomic methylation site. One can also use this approach to control the hybridization conditions to permit single nucleotide discrimination, e.g., for the identification of methylation at a site of interest. Arrays provide one convenient embodiment for detecting multiple methylation sites simultaneously (or in series). Of course, any detection technology (PCR, LCR, and/or sequencing etc.) can similarly be used, e.g., with multiplex amplification/detection/sequencing reactions, or simply by running several separate reactions, e.g., simultaneously or in series.

[0178] In embodiments, the use of DNA probe arrays to obtain methylation information involves the following general steps: design and manufacture of DNA probe arrays, preparation of the sample, bisulfite treatment, hybridization of sample DNA to the array, detection of hybridization events and data analysis to determine sequence. In embodiments, an array is used to capture polynucleotides containing a methylation site of interest, and the captured polynucleotides are subsequently amplified and/or sequenced. Preferred wafers are manufactured using a process adapted from semiconductor manufacturing to achieve cost effectiveness and high quality, and are available, e.g., from Affymetrix, Inc. of Santa Clara, Calif.

[0179] For example, probe arrays can be manufactured by light-directed chemical synthesis processes, which combine solid-phase chemical synthesis with photolithographic fabrication techniques as employed in the semiconductor industry. Using a series of photolithographic masks to define chip exposure sites, followed by specific chemical synthesis steps, the process constructs high-density arrays of oligonucleotides, with each probe in a predefined position in the array. Multiple probe arrays can be synthesized simultaneously on a large glass wafer. This parallel process enhances reproducibility and helps achieve economies of scale.

[0180] In embodiments, DNA probe arrays can be used to obtain data regarding presence of sequences (e.g., corresponding to methylated or unmethylated DNA) of interest. The DNA samples may be tagged with biotin and/or a fluorescent reporter group by standard biochemical methods. The labeled samples are incubated with an array, and segments of the samples bind, or hybridize, with complementary sequences on the array. The array can be washed and/or stained to produce a hybridization pattern. The array is then scanned and the patterns of hybridization are detected by emission of light from the fluorescent reporter groups. Because the identity and position of each probe on the array is known, the nature of the DNA sequences in the sample applied to the array can be determined.

[0181] In embodiments, the nucleic acid sample to be analyzed is isolated, bisulfite-treated, amplified and, optionally, labeled with biotin and/or a fluorescent reporter group. The labeled nucleic acid sample may then incubated with the array using a fluidics station and hybridization oven. The array can be washed and or stained or counter-stained, as appropriate to the detection method. After hybridization, washing and staining, the array is inserted into a scanner, where patterns of hybridization are detected. The hybridization data are collected as light emitted from the fluorescent reporter groups already incorporated into the labeled nucleic acid, which is now bound to the probe array. Probes that most clearly match the labeled nucleic acid produce stronger signals than those that have mismatches. Since the sequence and position of each probe on the array are known, by complementarity, the identity of the nucleic acid sample applied to the probe array can be identified. In embodiments, hybridization techniques and conditions that allow only fully complementary nucleotide sequences to hybridize with probes in an array are used.

[0182] Prior to amplification and/or detection of a nucleic acid comprising a sequence of interest, the nucleic acid is optionally purified from the samples by any available method, e.g., those taught in Berger and Kimmel, Guide to Molecular Cloning Techniques, Methods in Enzymology volume 152 Academic Press, Inc., San Diego, Calif. (Berger); Sambrook et al., Molecular Cloning—A Laboratory Manual (3rd Ed.), Vol. 1-3, Cold Spring Harbor Laboratory, Cold Spring Harbor, N.Y., 2001 (“Sambrook”); and/or Current Protocols in Molecular Biology, F. M. Ausubel et al., eds., Current Protocols, a joint venture between Greene Publishing Associates, Inc. and John Wiley & Sons, Inc., (supplemented through 2002) (“Ausubel”)). A plethora of kits are also commercially available for the purification of nucleic acids from cells or other samples (see, e.g., EasyPrep™, FlexiPrep™, both from Pharmacia Biotech; StrataClean™, from Stratagene; and, QIAprep™ from Qiagen). Alternately, samples can simply be directly subjected to amplification or detection, e.g., following aliquotting and/or dilution.

### Thyroid Cancer Diagnostic System and Processes

[0183] FIG. 4 depicts a block diagram illustrating an exemplary thyroid cancer diagnostic system 600. Referring to FIG. 4, the thyroid cancer diagnostic system 600 can include an input module 610, an isolation module 612, a conversion module 614, a detection module 616, a diagnosis module 618, a treatment module 620, and a user interface (UI) module 622. The thyroid cancer diagnostic system 600 can be configured to provide a diagnosis indicative of a presence of thyroid cancer and/or a risk of developing thyroid cancer. Moreover, the thyroid cancer diagnostic system 600 can be further configured to generate a treatment plan for a subject based on the diagnosis. For instance, when the diagnosis indicates a presence and/or risk of thyroid cancer in a subject, the thyroid cancer diagnostic system 600 can recommend one or more treatments including, for example, thyroid surgery, radiation therapy, radioactive iodine therapy, chemotherapy, thyroid hormone therapy, and administration of an active agent.

[0184] One or more modules of the thyroid cancer diagnostic system 600 can be realized in digital electronic circuitry, integrated circuitry, specially designed application specific integrated circuits (ASICs), field programmable gate arrays (FPGAs) computer hardware, firmware, software, and/or combinations thereof. The thyroid cancer diagnostic system 600 can further be communicatively coupled with one or more devices including, for example, a device 630. The thyroid cancer diagnostic system 600 can communicate with the device 620 via a wired and/or wireless network 640 (e.g., a wide area network (WAN), a local area network (LAN), and/or the Internet). As shown in FIG. 4, the thyroid cancer diagnostic system 600 can be further coupled with a data store 650.

[0185] The input module 610 can be adapted to receive and/or collect a sample of a thyroid nodule obtained from a subject. The isolation module 612 can be configured to isolate DNA from the thyroid nodule sample received by the input module 610 thereby forming isolated thyroid nodule DNA. The conversion module 614 can be configured to treat the isolated thyroid nodule DNA including by contacting the isolated thyroid nodule DNA with one or more bisulfite reagents including, for example, a bisulfite salt. Exposing the isolated thyroid nodule DNA to one or more bisulfite reagents can convert cytosine to uracil while 5-mC is left unmodified. Thus, the 5-mC present in the isolated thyroid nodule DNA will remain in the reacted thyroid nodule DNA. Meanwhile, any cytosine in the isolated thyroid nodule DNA will be replaced by uracil in the reacted thyroid nodule DNA. In embodiments, the treatment of the isolated thyroid nodule DNA can be performed by applying one or more kits (e.g., the Bisulflash DNA Modification Kit (Epigentek) or Imprint DNA Modification Kit (Sigma)).

[0186] In embodiments, the conversion module 614 can be further adapted to ensure optimal bisulfite conversion (e.g., with desired DNA fragment size for post-bisulfite ligation) by controlling one or more of a concentration of the bisulfite reagents, temperature, and reaction time period. It should be appreciated that the conversion module 614 can be adapted to use a different and/or additional type of reagent without departing from the scope of the present subject matter. For example, the conversion module 614 can treat the isolated thyroid nodule DNA with potassium chloride, which may reduce the thermophilic DNA degradation associated with the conversion of cytosine to uracil. Moreover, the conversion module 614 can be configured to perform additional processing of the reacted thyroid nodule DNA including, for example, desulphonation (e.g., with an alkalized solution), cleansing (e.g., by elution), and amplification (e.g., using the PCR method).

[0187] The detection module 616 can be configured to detect a methylation and/or unmethylation of the thyroid nodule DNA. For instance, the detection module 616 can detect methylation by detecting a presence of uracil in the reacted thyroid nodule DNA generated by the conversion module 614. Alternately and/or additionally, the detection module 616 can detect unmethylation by detecting an absence of uracil in the reacted thyroid nodule DNA. In embodiments, the detection module 616 can be configured detect the presence and/or absence of uracil at specific methylation sites. That is, the detection module 616 can be configured to detect the presence and/or absence of uracil at specific chromosomal positions of certain chromosomes. For example, the thyroid cancer diagnostic system 600 can store a plurality of specific methylation sites (e.g., Table 1) in the data store 650. As such, to detect methylation, the detection module 616 can be configured to obtain, from the data store 650, one or more specific methylation sites at which to test for the presence and/or absence of uracil. Moreover, in embodiments, the detection module 616 can be configured to determine a level of methylation and/or unmethylation at the specific methylation sites. The level of methylation at a particular site can correspond to a proportion of the reacted thyroid nodule DNA that has a cytosine rather than a uracil at that site. By contrast, the level of unmethylation at a particular site can correspond to a proportion of reacted thyroid nodule DNA that has a uracil rather than a cytosine at that site.

[0188] In embodiments, the conversion module 614 may amplify the reacted thyroid nodule DNA such as by using a PCR method. The detection of methylation and/or unmethylation in amplified reacted thyroid nodule DNA may require detection of a presence and/or absence of thymidine at a site of interest in amplicons amplified from the reacted thyroid nodule DNA. That is, instead of detecting the presence and/or absence of uracil, the detection module 616 can be configured to detect methylation and/or unmethylation of amplified reacted thyroid nodule DNA by detecting a presence and/or absence of thymidine at specific methylation sites (e.g., as set forth in Table 1).

[0189] The diagnosis module 618 can be configured to generate a diagnosis for the subject based on whether the detection module 616 detects methylation and/or unmethylation at the plurality of specific methylation sites (e.g., Table 1). Alternately or additionally, the diagnosis module 618 can be configured to generate a diagnosis for the subject based on a level of methylation and/or unmethylation detected by the detection module 616 at the plurality of specific methylation sites. For instance, diagnosis module 618 can determine that the thyroid nodule is malignant (e.g., cancerous) when the unmethylation level (e.g., proportion of uracil) at different methylation sites exceeds the corresponding thresholds (e.g., as set forth in Table 2). In embodiments, the diagnosis module 618 can further generate a diagnosis for the subject based on one or more of the subject's PTC methylation alternation score, a BTN methylation alternation score, and/or a Composite Cancer Risk Score.

[0190] In embodiments, the diagnosis module 618 can be configured to determine a PTC methylation alternation score for the subject. In embodiments, the PTC methylation alteration score can correspond to a number of specific methylation sites (e.g., as set forth in Table 1) that have a uracil level (or corresponding thymidine level if amplicons are being analyzed) equal to or greater than the corresponding thresholds (e.g., as set forth in Table 2). Alternately or additionally, the diagnosis module 618 can be configured to determine a BTN methylation alternation score for the subject. The BTN methylation alteration score can correspond to a number of specific methylation sites (e.g., as set forth in Table 1) that have a uracil level (or corresponding thymidine level if amplicons are being analyzed) equal to or greater than the various corresponding threshold level (e.g., as set forth in Table 3 and/or Table 4).

[0191] In embodiments, the diagnosis module 618 can further be configured to compute a Composite Cancer Risk Score for the subject. The diagnosis module 618 can compute the Composite Cancer Risk Score based on the PTC methylation alteration score and the BTN methylation alteration score for the subject. For example, the Composite Cancer Risk Score for the subject can be computed based on equation (1):

$$\frac{[ the PTC methylation alteration score for the subject ]}{[ BTN methylation alteration score for the subject ]} . \qquad ( 1 )$$

[0192] Alternately or additionally, the Composite Cancer Risk Score for the subject can be computed based on equation (2):

$$\frac{[ ( the PTC methylation alteration score for the subject ) + 1 ]}{[ ( BTN methylation alteration score for the subject ) + 1 ]} \qquad ( 2 )$$

[0193] The treatment module 620 can be configured to formulate a treatment plan for the subject based on the diagnosis generated by the diagnosis module 618. For instance, when the diagnosis generated by the diagnosis module 618 indicates a presence and/or risk of a malignant (e.g., cancerous) thyroid nodule, the treatment module 620 can prescribe one or more treatments including, for example, thyroid surgery, radiation therapy, radioactive iodine therapy, chemotherapy, thyroid hormone therapy, and administration of an active agent. In embodiments, the treatment module 620 can be configured to provide the treatment plan to the device 630 via the network 640. Alternately or additionally, the treatment module 620 can store the treatment plan in the data store 650.

[0194] The UI module 622 can be configured to generate a UI through which a user (e.g., a physician) can interface with the thyroid cancer diagnostic system 600. For example, the UI module 622 can provide one or more graphic user interfaces (GUIs) configured to display the diagnosis and/or treatment plan for the subject.

[0195] FIG. 5 depicts a flowchart illustrating an exemplary process 700 for diagnosing thyroid cancer. Referring to FIGS. 4-5, the process 700 can be performed by the thyroid cancer diagnostic system 600.

[0196] The thyroid cancer diagnostic system 600 (e.g., the input module 610) can receive a sample of a thyroid nodule from a subject (702). The thyroid cancer diagnostic system 600 (e.g., the isolation module 612) can isolate thyroid nodule DNA from the thyroid nodule sample (704). The thyroid cancer diagnostic system 600 (e.g., the conversion module 614) can treat the isolated thyroid nodule DNA with a bisulfite salt to generate reacted thyroid nodule DNA (706). Treating the isolated thyroid nodule DNA with the bisulfite salt can form a reacted thyroid nodule DNA by converting the cytosine present in the isolated thyroid nodule DNA to uracil. In embodiments, the thyroid cancer diagnostic system 600 can further process the reacted thyroid nodule DNA by desulphonating, cleansing, and/or amplifying the reacted thyroid nodule DNA.

[0197] The thyroid cancer diagnostic system 600 (e.g., the detection module 616) can detect methylation and/or unmethylation of the isolated thyroid nodule DNA by at least detecting a presence and/or absence of uracil in the reacted thyroid nodule DNA (708). In embodiments, the thyroid cancer diagnostic system 600 can be configured to detect a presence and/or absence of uracil at specific methylation sites (e.g., as set forth in Table 1). Moreover, the thyroid cancer diagnostic system 600 can be configured to detect a level of methylation and/or unmethylation at the methylation sites.

[0198] The thyroid cancer diagnostic system 600 (e.g., the diagnostics module 618) can generate a diagnosis for the subject based on the methylation and/or unmethylation of the isolated thyroid nodule DNA (710). For example, the thyroid cancer diagnostic system 600 can generate a diagnosis based on a level of methylation and/or unmethylation at a plurality of specific methylation sites. Each methylation site may be associated with a certain threshold unmethylation level (e.g., as set forth in Table 2). As such, the thyroid cancer diagnostic system 600 can determine that the thyroid nodule from the subject is malignant (e.g., cancerous) if the level of unmethylation at the plurality of methylation sites exceeds the corresponding thresholds.

[0199] The thyroid cancer diagnostic system 600 (e.g., the treatment module 620) can formulate, based on the diagnosis, a treatment plan for the subject (712). For example, when the diagnosis indicates that a presence and/or risk of malignant thyroid nodules in the subject, the thyroid cancer diagnostic system 600 can prescribe thyroid surgery, radiation therapy, radioactive iodine therapy, chemotherapy, thyroid hormone therapy, and/or administration of an active agent. The thyroid cancer diagnostic system 600 (e.g., the UI module 622) can provide, via a UI (e.g., GUI at the device 630), the diagnosis and/or the treatment plan for the subject (714).

[0200] FIG. 6 depicts a flowchart illustrating an exemplary process 800 for diagnosing thyroid cancer. Referring to FIGS. 4 and 6, the process 700 can be performed by the thyroid cancer diagnostic system 600.

[0201] The thyroid cancer diagnostic system 600 (e.g., the input module 610) can receive a sample of a thyroid nodule from a subject (802). The thyroid cancer diagnostic system 600 (e.g., the isolation module 612) can isolate thyroid nodule DNA from the thyroid nodule sample (804). The thyroid cancer diagnostic system 600 (e.g., the conversion module 614) can treat the isolated thyroid nodule DNA with a bisulfite salt to generate reacted thyroid nodule DNA (806).

[0202] As shown in FIG. 6, the thyroid cancer diagnostic system 600 (e.g., the conversion module 614) can amplify the reacted thyroid nodule DNA (808). For instance, the thyroid cancer diagnostic system 600 can amplify the reacted thyroid nodule DNA subsequent to treating the isolated thyroid nodule NA with the bisulfite salt to generate the reacted thyroid nodule DNA. The thyroid cancer diagnostic system 600 can detect methylation and/or unmethylation of the isolated thyroid nodule DNA by detecting a presence and/or absence of thymidine in the amplified reacted thyroid nodule DNA (810).

[0203] The thyroid cancer diagnostic system 600 (e.g., the diagnostics module 618) can generate a diagnosis for the subject based on the methylation and/or unmethylation of the isolated thyroid nodule DNA (812). Moreover, the thyroid cancer diagnostic system 600 (e.g., the treatment module 620) can formulate, based on the diagnosis, a treatment plan for the subject (814). The thyroid cancer diagnostic system 600 (e.g., the UI module 622) can provide, via a UI, the diagnosis and/or treatment plan for the subject.

[0204] It should be appreciated that the process 700 and/or 800 can include different and/or additional operations without departing from the scope of the present subject matter. Moreover, one or more operations of the process 700 and/or 800 can be omitted and/or repeated without departing from the scope of the present subject matter.

[0205] Implementations of the present subject matter can include, but are not limited to, methods consistent with the descriptions provided above as well as articles that comprise a tangibly embodied machine-readable medium operable to cause one or more machines (e.g., computers, etc.) to result in operations implementing one or more of the described features. Similarly, computer systems are also described that can include one or more processors and one or more memories coupled to the one or more processors. A memory, which can include a computer-readable storage medium, can include, encode, store, or the like one or more programs that cause one or more processors to perform one or more of the operations described herein. Computer implemented methods consistent with one or more implementations of the current subject matter can be implemented by one or more data processors residing in a single computing system or multiple computing systems. Such multiple computing systems can be connected and can exchange data and/or commands or other instructions or the like via one or more connections, including but not limited to a connection over a network (e.g. the Internet, a wireless wide area network, a local area network, a wide area network, a wired network, or the like), via a direct connection between one or more of the multiple computing systems, etc.

[0206] One or more aspects or features of the subject matter described herein can be realized in digital electronic circuitry, integrated circuitry, specially designed ASICs, FPGAs, computer hardware, firmware, software, and/or combinations thereof. These various aspects or features can include implementation in one or more computer programs that are executable and/or interpretable on a programmable system including at least one programmable processor, which can be special or general purpose, coupled to receive data and instructions from, and to transmit data and instructions to, a storage system, at least one input device, and at least one output device. The programmable system or computing system can include clients and servers. A client and server are generally remote from each other and typically interact through a communication network. The relationship of client and server arises by virtue of computer programs running on the respective computers and having a client-server relationship to each other.

[0207] These computer programs, which can also be referred to programs, software, software applications, applications, components, or code, include machine instructions for a programmable processor, and can be implemented in a high-level procedural language, an object-oriented programming language, a functional programming language, a logical programming language, and/or in assembly/machine language. As used herein, the term “machine-readable medium” refers to any computer program product, apparatus and/or device, such as for example magnetic discs, optical disks, memory, and Programmable Logic Devices (PLDs), used to provide machine instructions and/or data to a programmable processor, including a machine-readable medium that receives machine instructions as a machine-readable signal. The term “machine-readable signal” refers to any signal used to provide machine instructions and/or data to a programmable processor. The machine-readable medium can store such machine instructions non-transitorily, such as for example as would a non-transient solid-state memory or a magnetic hard drive or any equivalent storage medium. The machine-readable medium can alternatively or additionally store such machine instructions in a transient manner, such as for example as would a processor cache or other random access memory associated with one or more physical processor cores.

[0208] To provide for interaction with a user, one or more aspects or features of the subject matter described herein can be implemented on a computer having a display device, such as for example a cathode ray tube (CRT) or a liquid crystal display (LCD) or a light emitting diode (LED) monitor for displaying information to the user and a keyboard and a pointing device, such as for example a mouse or a trackball, by which the user may provide input to the computer. Other kinds of devices can be used to provide for interaction with a user as well. For example, feedback provided to the user can be any form of sensory feedback, such as for example visual feedback, auditory feedback, or tactile feedback; and input from the user can be received in any form, including, but not limited to, acoustic, speech, or tactile input. Other possible input devices include, but are not limited to, touch screens or other touch-sensitive devices such as single or multi-point resistive or capacitive trackpads, voice recognition hardware and software, optical scanners, optical pointers, digital MRI image capture devices and associated interpretation software, and the like.

[0209] Examples are provided below to facilitate a more complete understanding of the invention. The following examples illustrate the exemplary modes of making and practicing the invention. However, the scope of the invention is not limited to specific embodiments disclosed in these Examples, which are for purposes of illustration only, since alternative methods can be utilized to obtain similar results.

### EMBODIMENTS

[0210] Embodiments include embodiments P1 to P41 following.

[0211] Embodiment P1. A method of detecting methylation or unmethylation of a thyroid nodule DNA of a subject, the method comprising: (i) isolating DNA from a thyroid nodule of said subject thereby forming isolated thyroid nodule DNA, (ii) contacting said isolated thyroid nodule DNA with sodium bisulfite thereby forming a reacted thyroid nodule DNA, (iii) detecting the presence or absence of uracil in said reacted thyroid nodule DNA at a methylation site set forth in Table 1, thereby detecting methylation or unmethylation of said thyroid nodule DNA of said subject.

[0212] Embodiment P2. The method of embodiment P1, further comprising determining alteration in methylation at a plurality of methylation sites set forth in Table 1.

[0213] Embodiment P3. The method of embodiment P2, said alteration comprises increase or loss of uracil level at said plurality of methylation sites.

[0214] Embodiment P4. The method of embodiment P3, wherein said uracil level is above a threshold as set forth in Table 2.

[0215] Embodiment P5. The method of embodiment P3, wherein said uracil level is above a threshold as set forth in Table 3.

[0216] Embodiment P6. The method of embodiment P3, wherein said uracil level is below a threshold as set forth in Table 4.

[0217] Embodiment P7. The method of embodiment P3, wherein said subject is a candidate thyroid cancer patient.

[0218] Embodiment P8. The method of embodiment P4, wherein said above threshold identifies said thyroid nodule as a cancerous thyroid nodule.

[0219] Embodiment P9. The method of embodiment P5, wherein said above threshold identifies said thyroid nodule as a benign thyroid nodule.

[0220] Embodiment P10. The method of embodiment P6, wherein said below threshold identifies said thyroid nodule as a benign thyroid nodule.

[0221] Embodiment P11. The method of one of the above embodiments, wherein said thyroid nodule is a specimen obtained by biopsy or by surgical resection of said subject.

[0222] Embodiment P12. The method of embodiment P11, wherein said subject has undergone thyroid surgery, radiation therapy, radioactive iodine therapy, chemotherapy, thyroid hormone therapy, and administration of an active agent.

[0223] Embodiment P13. The method of embodiment P12, wherein said active agent is chosen from Cabozantinib-S-Malate, Caprelsa (Vandetanib), Cometriq (Cabozantinib-S-Malate), Doxorubicin Hydrochloride, Lenvatinib Mesylate, Lenvima (Lenvatinib Mesylate), Nexavar (Sorafenib Tosylate), Sorafenib Tosylate, and Vandetanib.

[0224] Embodiment P14. A method of determining a thyroid cancer or risk of developing thyroid cancer in a subject in need thereof, said method comprising: (i) isolating DNA from a thyroid nodule of said subject thereby forming isolated thyroid nodule DNA; (ii) contacting said isolated thyroid nodule DNA with sodium bisulfite thereby forming a reacted thyroid nodule DNA; and (iii) detecting the presence or absence of uracil in said reacted thyroid nodule DNA at a methylation site set forth in Table 1; thereby determining said thyroid cancer in said subject.

[0225] Embodiment P15. The method of embodiment P14, further comprising selecting a subject that has or is at risk for developing thyroid cancer.

[0226] Embodiment P16. The method of embodiment P14, further comprising determining alteration in methylation at a plurality of methylation sites set forth in Table 1.

[0227] Embodiment P17. The method of embodiment P16, said alteration comprises increase or loss of uracil level at said plurality of methylation sites.

[0228] Embodiment P18. The method of embodiment P17, wherein said uracil level is above a threshold as set forth in Table 2.

[0229] Embodiment P19. The method of embodiment P17, wherein said uracil level is above a threshold as set forth in Table 3.

[0230] Embodiment P20. The method of embodiment P17, wherein said uracil level is below a threshold as set forth in Table 4.

[0231] Embodiment P21. The method of embodiment P17, wherein said subject is a candidate thyroid cancer patient.

[0232] Embodiment P22. The method of embodiment P18, wherein said above threshold identifies said thyroid nodule as a cancerous thyroid nodule.

[0233] Embodiment P23. The method embodiment P19, wherein said above threshold identifies said thyroid nodule as a benign thyroid nodule.

[0234] Embodiment P24. The method of embodiment P20, wherein said below threshold identifies said thyroid nodule as a benign thyroid nodule.

[0235] Embodiment P25. The method of embodiments P14-P24, wherein said thyroid nodule is a specimen obtained by biopsy or by surgical resection of said subject.

[0236] Embodiment P26. The method of embodiment P25, wherein said subject has undergone thyroid surgery, radiation therapy, radioactive iodine therapy, chemotherapy, thyroid hormone therapy, and administration of an active agent, before said determination.

[0237] Embodiment P27. The method of embodiment P26, wherein said active agent is chosen from Cabozantinib-S-Malate, Caprelsa (Vandetanib), Cometriq (Cabozantinib-S-Malate), Doxorubicin Hydrochloride, Lenvatinib Mesylate, Lenvima (Lenvatinib Mesylate), Nexavar (Sorafenib Tosylate), Sorafenib Tosylate, and Vandetanib.

[0238] Embodiment P28. A method of treating thyroid cancer in a subject determined by the method as set forth in embodiment P22, comprising administering to said subject an active agent for treating thyroid cancer.

[0239] Embodiment P29. The method of embodiment P28, wherein said subject has undergone surgery, radiation therapy, radioactive iodine therapy, chemotherapy, or thyroid hormone therapy, before said detection of embodiment 14 at (iii).

[0240] Embodiment P30. The method of embodiment P29, wherein said active agent is chosen from Cabozantinib-S-Malate, Caprelsa (Vandetanib), Cometriq (Cabozantinib-S-Malate), Doxorubicin Hydrochloride, Lenvatinib Mesylate, Lenvima (Lenvatinib Mesylate), Nexavar (Sorafenib Tosylate), Sorafenib Tosylate, and Vandetanib.

[0241] Embodiment P31. The method of one of above embodiments, wherein said subject has or is at risk of papillary thyroid cancer, follicular thyroid cancer, medullary thyroid cancer, or anaplastic thyroid cancer.

[0242] Embodiment P32. A deoxyribonucleic acid 5 to 100 nucleotides in length comprising a uracil-containing sequence identical to at least a 5 contiguous nucleotide sequence within a sequence chosen from SEQ ID NO:1 to SEQ ID NO:550.

[0243] Embodiment P33. The deoxyribonucleic acid of embodiment P32 identical to 5-10, 10-20, 20-30, 30-40, 40-50, 50-60, 60-70, 70-80, 80-90, 90-100, 100-110, 110-120, 120-130, 130-140, 140-150, 150-160, 160-170, 170-180, 180-190, or 190-200 of contiguous nucleotide sequence of said sequence chosen from SEQ ID NO:1 to SEQ ID NO:550.

[0244] Embodiment P34. The deoxyribonucleic acid of embodiment P32 or P33, wherein said sequence comprises a methylation site set forth in Table 2.

[0245] Embodiment P35. The deoxyribonucleic acid of embodiment P34, wherein a plurality of methylation sites set forth in Table 2 are methylated or unmethylated.

[0246] Embodiment P36. A deoxyribonucleic acid chosen from SEQ ID NO:551 to SEQ ID NO:782, wherein said nucleic acid is hybridized to a complementary DNA sequence comprising uridine or cytosine.

[0247] Embodiment P37. The deoxyribonucleic acid of embodiment P36, further comprising an enzyme in a complex with said hybridized complementary DNA sequence.

[0248] Embodiment P38. The deoxyribonucleic acid of embodiment P37, wherein said enzyme is Taq polymerase.

[0249] Embodiment P39. A kit comprising 322 nucleic acids each independently comprising SEQ ID NO:551 to SEQ ID NO:782, wherein said nucleic acids do not simultaneously comprise the same SEQ ID NO:551 to SEQ ID NO:782.

[0250] Embodiment P40. The kit according to embodiment P39, further comprising: enzymes, reagents for deamination of cytosine, buffers, vials, plasmid vectors, control DNA, devices for collecting thyroid tissue samples, reagents for isolating DNA, reagents for labeling DNA, or any combinations thereof.

[0251] Embodiment P41. The kit according to embodiment P40, wherein the enzymes are selected from the group consisting of: thermostable DNA polymerase enzymes, restriction enzymes, and combination thereof.

[0252] Further embodiments include embodiments 1-58 following.

[0253] Embodiment 1. A method of detecting methylation or unmethylation of a thyroid nodule DNA molecule of a subject, the method comprising: (i) isolating a thyroid nodule DNA molecule from a thyroid nodule of said subject thereby forming an isolated thyroid nodule DNA molecule, (ii) contacting said isolated thyroid nodule DNA molecule with a bisulfite salt thereby forming a reacted thyroid nodule DNA molecule, (iii) detecting the presence or absence of uracil in said reacted thyroid nodule DNA molecule at a methylation site set forth in Table 1, thereby detecting methylation or unmethylation of said thyroid nodule DNA molecule of said subject.

[0254] Embodiment 2. The method of embodiment 1, further comprising detecting the presence or absence of uracil in said reacted thyroid nodule DNA molecule at a plurality of methylation sites set forth in Table 1, wherein said methylation site forms a part of said plurality of methylation sites.

[0255] Embodiment 3. The method of embodiment 1, the method further comprising: (i) isolating a plurality of thyroid nodule DNA molecules from said thyroid nodule of said subject thereby forming a plurality of isolated thyroid nodule DNA molecules, wherein said isolated thyroid nodule DNA molecule forms part of said plurality of isolated thyroid nodule DNA molecules, (ii) contacting said plurality of isolated thyroid nodule DNA molecules with said bisulfite salt thereby forming a plurality of reacted thyroid nodule DNA molecules, wherein said reacted thyroid nodule DNA molecule forms part of said plurality of reacted thyroid nodule DNA molecules, (iii) detecting the level of reacted thyroid nodule DNA molecules in said plurality of reacted thyroid nodule DNA molecules having a uracil at a methylation site set forth in Table 1, thereby detecting the level of methylation or unmethylation in said plurality of thyroid nodule DNA molecules of said subject.

[0256] Embodiment 4. The method of embodiment 3, further comprising determining the level of uracil in said reacted thyroid nodule DNA molecule at a plurality methylation sites set forth in Table 1, wherein said methylation site forms a part of said plurality of methylation sites.

[0257] Embodiment 5. The method of embodiment 4, wherein said uracil level is above a threshold as set forth in Table 2.

[0258] Embodiment 6. The method of embodiment 4, wherein said uracil level is above a threshold as set forth in Table 3.

[0259] Embodiment 7. The method of embodiment 4, wherein said uracil level is below a threshold as set forth in Table 4.

[0260] Embodiment 8. The method of one of the above embodiments, wherein said subject is suspected of having thyroid cancer.

[0261] Embodiment 9. The method of one of the above embodiments, wherein said thyroid nodule is a specimen obtained by biopsy or by surgical resection of said subject.

[0262] Embodiment 10. The method of one of the above embodiments, wherein said subject has undergone thyroid surgery, radiation therapy, radioactive iodine therapy, chemotherapy, thyroid hormone therapy, and/or administration of an active agent.

[0263] Embodiment 11. The method of embodiment 10, wherein said active agent is chosen from Cabozantinib-S-Malate, Caprelsa (Vandetanib), Cometriq (Cabozantinib-S-Malate), Doxorubicin Hydrochloride, Lenvatinib Mesylate, Lenvima (Lenvatinib Mesylate), Nexavar (Sorafenib Tosylate), Sorafenib Tosylate, and/or Vandetanib.

[0264] Embodiment 12. A method of detecting a thyroid cancer or risk of developing thyroid cancer in a subject in need thereof, said method comprising:
[0265] (i) isolating a thyroid nodule DNA molecule from a thyroid nodule of said subject thereby forming an isolated thyroid nodule DNA molecule;
[0266] (ii) contacting said isolated thyroid nodule DNA molecule with a bisulfite salt thereby forming a reacted thyroid nodule DNA molecule; and
[0267] (iii) detecting the presence or absence of uracil in said reacted thyroid nodule DNA molecule at a methylation site set forth in Table 1; thereby detecting said thyroid cancer in said subject.

[0268] Embodiment 13. The method of embodiment 12, wherein said subject (a) is a woman; (b) is about 20 to about 55 years old; (c) has a mutated Ret Proto-Oncogene; (d) has a grandparent, parent, or sibling who has been diagnosed with thyroid cancer; (e) self-identifies as being Caucasian or Asian; and/or (f) has or has had breast cancer.

[0269] Embodiment 14. The method of embodiment 12, further comprising detecting the presence or absence of uracil in said reacted thyroid nodule DNA molecule at a plurality of methylation sites set forth in Table 1, wherein said methylation site forms a part of said plurality of methylation sites.

[0270] Embodiment 15. The method of embodiment 12, the method further comprising: (i) isolating a plurality of thyroid nodule DNA molecules from said thyroid nodule of said subject thereby forming a plurality of isolated thyroid nodule DNA molecules, wherein said isolated thyroid nodule DNA molecule forms part of said plurality of isolated thyroid nodule DNA molecules, (ii) contacting said plurality of isolated thyroid nodule DNA molecules with said bisulfite salt thereby forming a plurality of reacted thyroid nodule DNA molecules, wherein said reacted thyroid nodule DNA molecule forms part of said plurality of reacted thyroid nodule DNA molecules, (iii) detecting the level of reacted thyroid nodule DNA molecules in said plurality of reacted thyroid nodule DNA molecules having a uracil at a methylation site set forth in Table 1; thereby detecting said thyroid cancer in said subject.

[0271] Embodiment 16. The method of embodiment 15, further comprising determining the level of uracil in said reacted thyroid nodule DNA molecule at a plurality methylation sites set forth in Table 1, wherein said methylation site forms a part of said plurality of methylation sites.

[0272] Embodiment 17. The method of embodiment 16, wherein said uracil level is above a threshold as set forth in Table 2.

[0273] Embodiment 18. The method of embodiment 16, wherein said uracil level is above a threshold as set forth in Table 3.

[0274] Embodiment 19. The method of embodiment 16, wherein said uracil level is below a threshold as set forth in Table 4.

[0275] Embodiment 20. The method of one of the above embodiments, wherein said subject is suspected of having thyroid cancer.

[0276] Embodiment 21. The method of one of the above embodiments, wherein said thyroid nodule is a specimen obtained by biopsy or by surgical resection of said subject.

[0277] Embodiment 22. The method of one of the above embodiments, wherein said subject has undergone thyroid surgery, radiation therapy, radioactive iodine therapy, chemotherapy, thyroid hormone therapy, and administration of an active agent, before said determination.

[0278] Embodiment 23. The method of embodiment 22, wherein said active agent is chosen from Cabozantinib-S-Malate, Caprelsa (Vandetanib), Cometriq (Cabozantinib-S-Malate), Doxorubicin Hydrochloride, Lenvatinib Mesylate, Lenvima (Lenvatinib Mesylate), Nexavar (Sorafenib Tosylate), Sorafenib Tosylate, and.

[0279] Embodiment 24. A method of treating thyroid cancer in a subject determined by the method as set forth in any of embodiments 12 to 23, comprising administering to said subject an active agent for treating thyroid cancer.

[0280] Embodiment 25. The method of embodiment 24, wherein said subject has undergone surgery, radiation therapy, radioactive iodine therapy, chemotherapy, or thyroid hormone therapy, before said detection of claim 12 at (iii).

[0281] Embodiment 26. The method of embodiment 25, wherein said active agent is chosen from Cabozantinib-S-Malate, Caprelsa (Vandetanib), Cometriq (Cabozantinib-S-Malate), Doxorubicin Hydrochloride, Lenvatinib Mesylate, Lenvima (Lenvatinib Mesylate), Nexavar (Sorafenib Tosylate), Sorafenib Tosylate, and Vandetanib.

[0282] Embodiment 27. The method of one of the above embodiments, wherein said subject has or is at risk of papillary thyroid cancer, follicular thyroid cancer, medullary thyroid cancer, or anaplastic thyroid cancer.

[0283] Embodiment 28. The method of one of the above embodiments, wherein said bisulfite salt is sodium bisulfite.

[0284] Embodiment 29. The method of one of the above embodiments, further comprising determining a papillary thyroid carcinoma (PTC) methylation alteration score for said subject, wherein the PTC methylation alteration score is equal to: the number of methylation sites in Table 1 having a uracil level equal to or greater than the corresponding threshold level set forth in Table 2.

[0285] Embodiment 30. The method of one of the above embodiments, further comprising determining a benign thyroid nodule (BTN) methylation alteration score for said subject, wherein the BTN methylation alteration score is equal to:
[0286] (a) the number of methylation sites in Table 1 having a uracil level equal to or greater than the corresponding threshold level set forth in Table 3;
[0287] (b) the number of methylation sites in Table 1 having a uracil level equal to or less than the corresponding threshold level set forth in Table 4; or
[0288] (c) the number of methylation sites in Table 1 having a uracil level equal to or greater than the corresponding threshold level set forth in Table 3 plus the number of methylation sites in Table 1 having a uracil level equal to or less than the corresponding threshold level set forth in Table 4.

[0289] Embodiment 31. The method of embodiment 29, further comprising calculating a Composite Cancer Risk Score for said subject.

[0290] Embodiment 32. The method of embodiment 31, wherein said Composite Cancer Risk Score for said subject equals:
[0291] [the PTC methylation alteration score for said subject]/[BTN methylation alteration score for said subject].

[0292] Embodiment 33. The method of embodiment 31, wherein said Composite Cancer Risk Score for said subject equals:
[0293] [(the PTC methylation alteration score for said subject)+1]/[(BTN methylation alteration score for said subject)+1].

[0294] Embodiment 34. The method of one of embodiments 29 to 33, wherein said subject is identified as being at risk of developing thyroid cancer or diagnosed as having thyroid cancer if (a) the PTC methylation alteration score for said subject is at least 5, 6, 7, 8, 9, or 10; (b) the BTN methylation alteration score for said subject is at least 5, 6, 7, 8, 9, or 10; and/or (c) the Composite Cancer Risk Score for said subject is at least about 2, 2.1, 2.2, 2.3, 2.4, 2.5, 2.6, 2.7, 2.8, 2.9, or 3.0.

[0295] Embodiment 35. The method of one of embodiments 29 to 33, wherein said subject is treated for thyroid cancer or directed to receive additional screening for thyroid cancer if (a) the PTC methylation alteration score for said subject is at least 5, 6, 7, 8, 9, or 10; (b) the BTN methylation alteration score for said subject is at least 5, 6, 7, 8, 9, or 10; and/or (c) the Composite Cancer Risk Score for said subject is at least about 2, 2.1, 2.2, 2.3, 2.4, 2.5, 2.6, 2.7, 2.8, 2.9, or 3.0.

[0296] Embodiment 36. A deoxyribonucleic acid at least 5 to 100 nucleotides in length comprising a uracil-containing sequence that is identical to a sequence of at least a 5 contiguous nucleotides within a sequence chosen from SEQ ID NO:1 to SEQ ID NO:550.

[0297] Embodiment 37. The deoxyribonucleic acid of embodiment 36, comprising a uracil-containing sequence that is identical to a sequence of at least 5-10, 10-20, 20-30, 30-40, 40-50, 50-60, 60-70, 70-80, 80-90, 90-100, 100-110, 110-120, 120-130, 130-140, 140-150, 150-160, 160-170, 170-180, 180-190, or 190-200 contiguous nucleotides within said sequence chosen from SEQ ID NO:1 to SEQ ID NO:550.

[0298] Embodiment 38. The deoxyribonucleic acid of embodiment 36 or 37, wherein said sequence comprises a methylation site set forth in Table 1.

[0299] Embodiment 39. The deoxyribonucleic acid of one of embodiments 36 to 38, wherein a plurality of methylation sites set forth in Table 1 contain a uracil or a cytosine.

[0300] Embodiment 40. A deoxyribonucleic acid chosen from SEQ ID NO:551 to SEQ ID NO:782, wherein said nucleic acid is hybridized to a complementary DNA sequence comprising uridine or cytosine.

[0301] Embodiment 41. The deoxyribonucleic acid of embodiment 40, further comprising an enzyme in a complex with said hybridized complementary DNA sequence.

[0302] Embodiment 42. The deoxyribonucleic acid of embodiment 41, wherein said enzyme is Taq polymerase.

[0303] Embodiment 43. A kit comprising a plurality of nucleic acids each independently comprising SEQ ID NO:551 to SEQ ID NO:782, wherein each nucleic acid of said plurality is unique.

[0304] Embodiment 44. The kit according to embodiment 43, further comprising: an enzyme, a reagent for deamination of cytosine, a buffer, a vial, a plasmid vector, a control DNA, a device for collecting a thyroid tissue sample, a reagent for isolating DNA, a reagent for labeling DNA, or any combination thereof.

[0305] Embodiment 45. The kit according to embodiment 44, wherein the enzyme comprises a thermostable DNA polymerase enzyme and/or a restriction enzyme.

[0306] Embodiment 46. A system for detecting methylation or unmethylation of a thyroid nodule deoxyribonucleic acid (DNA) of a subject, the system comprising:
[0307] at least one processor; and
[0308] at least one memory including program code which when executed by the at least one memory provides operations comprising:
[0309] isolating a thyroid nodule DNA molecule from a thyroid nodule of said subject thereby forming an isolated thyroid nodule DNA molecule;
[0310] contacting said isolated thyroid nodule DNA molecule with a bisulfite salt thereby forming a reacted thyroid nodule DNA molecule;
[0311] detecting the presence or absence of uracil in said reacted thyroid nodule DNA molecule at a methylation site set forth in Table 1, thereby detecting methylation or unmethylation of said thyroid nodule DNA molecule of said subject;
[0312] generating a diagnosis for said subject based at least in part on the presence or absence of uracil in said reacted thyroid nodule DNA molecule at the methylation site set forth in Table 1; and
[0313] providing, via a user interface, the diagnosis for said subject.

[0314] Embodiment 47. The system of embodiment 46, wherein the system is further configured to detect the presence or absence of uracil in said reacted thyroid nodule DNA molecule at a plurality of methylation sites set forth in Table 1, wherein said methylation site forms a part of said plurality of methylation sites.

[0315] Embodiment 48. The system of embodiment 46, wherein the system is further configured to: (i) isolate a plurality of thyroid nodule DNA molecules from said thyroid nodule of said subject thereby forming a plurality of isolated thyroid nodule DNA molecules, wherein said isolated thyroid nodule DNA molecule forms part of said plurality of isolated thyroid nodule DNA molecules, (ii) contact said plurality of isolated thyroid nodule DNA molecules with said bisulfite salt thereby forming a plurality of reacted thyroid nodule DNA molecules, wherein said reacted thyroid nodule DNA molecule forms part of said plurality of reacted thyroid nodule DNA molecules, (iii) detect the level of reacted thyroid nodule DNA molecules in said plurality of reacted thyroid nodule DNA molecules having a uracil at a methylation site set forth in Table 1, thereby detecting the level of methylation or unmethylation in said plurality of thyroid nodule DNA molecules of said subject.

[0316] Embodiment 49. The system of embodiment 48, wherein the system is further configured to detect the level of uracil in said reacted thyroid nodule DNA molecule at a plurality methylation sites set forth in Table 1, wherein said methylation site forms a part of said plurality of methylation sites.

[0317] Embodiment 50. The system of embodiment 49, wherein said uracil level is above a threshold as set forth in Table 2.

[0318] Embodiment 51. The system of embodiment 49, wherein said uracil level is above a threshold as set forth in Table 3.

[0319] Embodiment 52. The system of embodiment 49, wherein said uracil level is below a threshold as set forth in Table 4.

[0320] Embodiment 53. The system of embodiment 49, wherein said subject is a candidate thyroid cancer patient.

[0321] Embodiment 54. The system of one of embodiments 46 to 53, wherein said thyroid nodule is a specimen obtained by biopsy or by surgical resection of said subject.

[0322] Embodiment 55. The system of one of embodiments 46 to 54, wherein said subject has undergone thyroid surgery, radiation therapy, radioactive iodine therapy, chemotherapy, thyroid hormone therapy, and/or administration of an active agent.

[0323] Embodiment 56. The system of embodiment 55, wherein said active agent is chosen from Cabozantinib-S-Malate, Caprelsa (Vandetanib), Cometriq (Cabozantinib-S-Malate), Doxorubicin Hydrochloride, Lenvatinib Mesylate, Lenvima (Lenvatinib Mesylate), Nexavar (Sorafenib Tosylate), Sorafenib Tosylate, and Vandetanib.

[0324] Embodiment 57. The system of one of embodiments 46 to 56, wherein the system is further configured to:
[0325] formulate, based at least in part on the diagnosis, a treatment plan for said subject; and
[0326] provide, via the user interface, the treatment plan.

[0327] Embodiment 58. The system of embodiment 57, wherein the treatment plan includes one or more of thyroid surgery, radiation therapy, radioactive iodine therapy, chemotherapy, thyroid hormone therapy, and administration of an active agent.

### EXAMPLES

### Example 1

[0328] Human frozen specimens were blindly evaluated by a pathologist. In the study, 28 benign nodules and 40 thyroid cancer specimens were analyzed.

### DNA Methylation Profiling

[0329] Genomic DNA was isolated by using a standard phenol/chloroform extraction approach followed by ethanol precipitation. Further, genomic DNA underwent Reduced Representation Bisulfite Sequencing (RRBS) procedure. RRBS DNA amplicons were paired-end sequenced by using Hiseq 2500 (Illumina). For each sample, at least 15 million aligned reads were obtained. BTN and PTC specific signatures were determined based on cytosines which are characterized by at least 5 sequencing reads in each sample.

### Identification of BTN Specific and PTC Specific DNA Methylation Changes

[0330] DNA methylation patterns were analyzed in 114 thyroid specimens including 28 benign nodules, 40 thyroid cancer, and 46 adjacent normal thyroid tissues, to identify the presence of thyroid cancer specific and benign nodule specific signatures. After genome alignment, a search was performed for DNA regions which have BTN or PTC specific alterations. For identification of a DNA region with a BTN specific loss of DNA methylation, DNA regions were identified which had a DNA methylation level in at least 6 out 28 that was at least 2-fold less than the level of methylation in the same DNA region any analyzed PTC specimen; where the lowest value of DNA methylation at this DNA region among all PTC specimens is 20% or higher (FIG. 1A). For identification of DNA regions with BTN specific DNA methylation accumulation, the following criteria were used: a level of DNA methylation in an individual BTN that is at least 2-fold higher than the level of DNA methylation in the same DNA region in any analyzed PTC; where the value of DNA methylation of analyzed BTN specimen is at least 20% or more greater (FIG. 1). The BTN signature includes DNA regions which were affected by DNA methylation loss in at least 6 out 28 analyzed BTN samples and regions which were affected by DNA methylation accumulation in at least 6 out 28 analyzed BTN samples.

[0331] Further, regions were determined which undergo PTC specific DNA methylation alterations. The criteria for the identification of DNA regions with a PTC specific loss of DNA methylation, was: a level of DNA methylation in 6 out of 46 PTC that is 2-fold less than in any analyzed adenoma and any normal matching tissue, where the lowest value of DNA methylation in the region among all non-malignant specimens is 20% or higher. The criteria for the identification of DNA regions with PTC specific DNA methylation accumulation was a level of DNA methylation in an individual PTC that is at least 2-fold higher than the level of methylation in any analyzed adenoma and normal matching tissue, where the value of DNA methylation in analyzed PTC sample should be 20% or higher. There were no DNA regions that were affected by DNA methylation accumulation in at least 6 PTC out 46 analyzed PTC. Therefore, the PTC specific DNA methylation signatures contain only DNA regions which are affected by DNA methylation loss in at least 6 out 46 analyzed PTC.

[0332] The total number of identified DNA regions which fall in PTC specific or BTN specific signature is 258, which comprises DNA methylation information for 364 cytosines (FIG. 2A). There are 230 cytosines which characterize the PTC signature and 134 cytosines characterizing the BTN signature.

[0333] Evaluation of the cancer specific and benign specific changes revealed that 10 out of 40 thyroid cancer specimens are characterized by few (less than 5) or no cancer specific changes, and 4 out 28 benign nodules indicated very few (less than 5) benign specific changes (FIG. 2A). Since the approach described herein is based on the identification of the tissue specific alterations, these specimens were determined to be “epigenetically indeterminate.”

[0334] For specimens with a determinate epigenetic state, clustering analysis revealed a strict separation of thyroid cancer from benign nodules based on DNA methylation levels of cytosines associated with benign and cancer scores (FIG. 2B). Thus, the use of benign and cancer scores can provide a unique thyroid nodule diagnostic tool.

### Development of Diagnostic Panel Based on BTN/PTC Signature Scores.

[0335] The data disclosed herein demonstrates that analysis of DNA methylation of one or more of 258 DNA regions can provide substantial information regarding a presence of malignancy in thyroid samples. Therefore, DNA methylation analysis within BTN and PTC signature can be used as a PTC diagnostic tool. According to the data, PTC diagnosis can be made by using both BTN and PTC signatures. Each signature can be a score based on the number of specific alterations within the signature for each individual sample. For example, the number of BTN specific alterations within BTN signature DNA regions reflects a BTN signature score. At the same time, the number of PTC specific alterations for DNA regions within PTC signature group indicates PTC signature score.

[0336] In order to validate the approach disclosed herein and estimate an accuracy of the proposed signatures, a statistical analysis was performed based on the leave-one-out-cross-validation technique. Specifically, cancer and benign scores were determined for each individual nodule by using benign and cancer signatures which were developed based on DNA methylation patterns of the rest of samples excluding the testing sample. In order to predict benign and cancer scores for 68 nodules, 68 benign and cancer unique predictive signatures were developed.

[0337] After cross-validation, DNA methylation signatures (score >=5) were observed in 80% (32 out 40) of thyroid cancers and 82% (23 out 28) of benign nodules (FIG. 3A). These specimens with a determinate epigenetic state were used for the further analysis.

[0338] According to the cross-validation observations, both, benign and malignant diagnostic scores provided accurate results for thyroid nodule diagnostics (FIG. 3A). However, a combining of benign and malignant scores into a cancer risk score is associated with even higher diagnostic performance. The cancer risk score was calculated using the following equation:

Cancer Risk Score=(cancer score+1)/(benign score+1)

[0339] According to the data herein, specimens with cancer risk score above 2.6 represent thyroid cancer and specimens with cancer score below 2.6 are benign nodules. Based on these criteria, all 23 nodules were correctly diagnosed as benign and 30 out 32 thyroid malignancies were diagnosed as a cancer (FIG. 3B). Therefore, the test had a specificity of 100% and a sensitivity of 94%, with a 100% positive predictive value (PPV) and a 92% negative predictive value (NPV). These data suggest that DNA methylation analysis of 258 DNA regions in thyroid specimens can serve as a potential diagnostic tool for the determination of malignancy.

[0340] An algorithm for performing a thyroid nodule diagnostic evaluation is shown in FIG. 3C. Specimens with benign and malignant signatures are associated with indeterminate epigenetic state and were excluded from the study. Specimens with a cancer risk score above 2.6 are considered to be malignant, and thyroid nodules with a cancer risk score below 2.6 are considered to be benign.

[0341] This scoring approach clearly differentiates benign from malignant specimens. These data suggest that DNA methylation analysis of 258 DNA regions in thyroid specimens, including potentially FNA specimens, can serve as a diagnostic tool for the determination of malignancy.

[0342] The data indicates that malignancy of thyroid specimens can be determined by DNA methylation pattern analysis of one or more of 258 different DNA regions.

The application's sequence listing, which the Patent Office published only in electronic form, follows.

SEQUENCE LISTING (782 sequences)

SEQ ID NO: 1 - DNA, 300 bp, synthetic construct
  source 1..300: mol_type = other DNA
  modified_base 2..3: mod_base = OTHER; note = uracil
  modified_base 8..10: mod_base = OTHER; note = uracil
  modified_base 12: mod_base = OTHER; note = uracil
  modified_base 20..21: mod_base = OTHER; note = uracil
  modified_base 33..34: mod_base = OTHER; note = uracil
  modified_base 36: mod_base = OTHER; note = uracil
  modified_base 48..50: mod_base = OTHER; note = uracil
  modified_base 52..53: mod_base = OTHER; note = uracil
  modified_base 57..59: mod_base = OTHER; note = uracil
  modified_base 64: mod_base = OTHER; note = uracil
  modified_base 69: mod_base = OTHER; note = uracil
  modified_base 72: mod_base = OTHER; note = uracil
  modified_base 75: mod_base = OTHER; note = uracil
  modified_base 80: mod_base = OTHER; note = uracil
  modified_base 82: mod_base = OTHER; note = uracil
  modified_base 97: mod_base = OTHER; note = uracil
  modified_base 108: mod_base = OTHER; note = uracil
  modified_base 125: mod_base = OTHER; note = uracil
  modified_base 132: mod_base = OTHER; note = uracil
  modified_base 138: mod_base = OTHER; note = uracil
  modified_base 140: mod_base = OTHER; note = uracil
  modified_base 145: mod_base = OTHER; note = uracil
  modified_base 148: mod_base = OTHER; note = uracil
  modified_base 152: mod_base = OTHER; note = uracil
  modified_base 158..161: mod_base = OTHER; note = uracil
  modified_base 172: mod_base = OTHER; note = uracil
  modified_base 188: mod_base = OTHER; note = uracil
  modified_base 201..202: mod_base = OTHER; note = uracil
  modified_base 207..209: mod_base = OTHER; note = uracil
  modified_base 215: mod_base = OTHER; note = uracil
  modified_base 219: mod_base = OTHER; note = uracil
  modified_base 236..238: mod_base = OTHER; note = uracil
  modified_base 240: mod_base = OTHER; note = uracil
  modified_base 252: mod_base = OTHER; note = uracil
  modified_base 262: mod_base = OTHER; note = uracil
  modified_base 265..266: mod_base = OTHER; note = uracil
  modified_base 272: mod_base = OTHER; note = uracil
  modified_base 278..280: mod_base = OTHER; note = uracil
  modified_base 295: mod_base = OTHER; note = uracil
  modified_base 13: mod_base = m5c
  modified_base 18: mod_base = m5c
  modified_base 42: mod_base = m5c
  modified_base 44: mod_base = m5c
  modified_base 54: mod_base = m5c
  modified_base 122: mod_base = m5c
  modified_base 128: mod_base = m5c
  modified_base 146: mod_base = m5c
  modified_base 183: mod_base = m5c
  modified_base 203: mod_base = m5c
  variation 150: note = CpG site, residue is C if methylated or T(=U) if unmethylated
tttttagtttttcgtggcgttagagttggttgttttagtagcgcgtgtttattcggtttaaagttgttttgtagttggttattgtgggagaagagattggaaaagtttaaaggtggagaggcggtagcgatttggagtattttttcgtaygttgtaatttttgagaagaaataaagaggaaacgaggttgtttagataatttcgggttttggtgtttgtatttagaaaaattaggtttttttgaaaaattatagaattatgttgttagtgttaggtttttagataatgatgtgtttgtgt

SEQ ID NO: 2 - DNA, 300 bp, synthetic construct
  source 1..300: mol_type = other DNA
  modified_base 1: mod_base = OTHER; note = uracil
  modified_base 3: mod_base = OTHER; note = uracil
  modified_base 7: mod_base = OTHER; note = uracil
  modified_base 9: mod_base = OTHER; note = uracil
  modified_base 12: mod_base = OTHER; note = uracil
  modified_base 18: mod_base = OTHER; note = uracil
  modified_base 25..26: mod_base = OTHER; note = uracil
  modified_base 30: mod_base = OTHER; note = uracil
  modified_base 32: mod_base = OTHER; note = uracil
  modified_base 36: mod_base = OTHER; note = uracil
  modified_base 39: mod_base = OTHER; note = uracil
  modified_base 46: mod_base = OTHER; note = uracil
  modified_base 57: mod_base = OTHER; note = uracil
  modified_base 65..66: mod_base = OTHER; note = uracil
  modified_base 75: mod_base = OTHER; note = uracil
  modified_base 82: mod_base = OTHER; note = uracil
  modified_base 86: mod_base = OTHER; note = uracil
  modified_base 88..89: mod_base = OTHER; note = uracil
  modified_base 94..95: mod_base = OTHER; note = uracil
  modified_base 105: mod_base = OTHER; note = uracil
  modified_base 110: mod_base = OTHER; note = uracil
  modified_base 113..114: mod_base = OTHER; note = uracil
  modified_base 121..122: mod_base = OTHER; note = uracil
  modified_base 124: mod_base = OTHER; note = uracil
  modified_base 132: mod_base = OTHER; note = uracil
  modified_base 135: mod_base = OTHER; note = uracil
  modified_base 137: mod_base = OTHER; note = uracil
  modified_base 146: mod_base = OTHER; note = uracil
  modified_base 163: mod_base = OTHER; note = uracil
  modified_base 165..166: mod_base = OTHER; note = uracil
  modified_base 173: mod_base = OTHER; note = uracil
  modified_base 176: mod_base = OTHER; note = uracil
  modified_base 179..180: mod_base = OTHER; note = uracil
  modified_base 182: mod_base = OTHER; note = uracil
  modified_base 184..185: mod_base = OTHER; note = uracil
  modified_base 187..188: mod_base = OTHER; note = uracil
  modified_base 195: mod_base = OTHER; note = uracil
  modified_base 200..201: mod_base = OTHER; note = uracil
  modified_base 205: mod_base = OTHER; note = uracil
  modified_base 207: mod_base = OTHER; note = uracil
  modified_base 210: mod_base = OTHER; note = uracil
  modified_base 212..214: mod_base = OTHER; note = uracil
  modified_base 216: mod_base = OTHER; note = uracil
  modified_base 222..223: mod_base = OTHER; note = uracil
  modified_base 226: mod_base = OTHER; note = uracil
  modified_base 229: mod_base = OTHER; note = uracil
  modified_base 234: mod_base = OTHER; note = uracil
  modified_base 237: mod_base = OTHER; note = uracil
  modified_base 244: mod_base = OTHER; note = uracil
  modified_base 253: mod_base = OTHER; note = uracil
  modified_base 259: mod_base = OTHER; note = uracil
  modified_base 262: mod_base = OTHER; note = uracil
  modified_base 268: mod_base = OTHER; note = uracil
  modified_base 271..272: mod_base = OTHER; note = uracil
  modified_base 275: mod_base = OTHER; note = uracil
  modified_base 277: mod_base = OTHER; note = uracil
  modified_base 283..284: mod_base = OTHER; note = uracil
  modified_base 293: mod_base = OTHER; note = uracil
  modified_base 300: mod_base = OTHER; note = uracil
  modified_base 96: mod_base = m5c
  modified_base 116: mod_base = m5c
  modified_base 153: mod_base = m5c
  modified_base 171: mod_base = m5c
  modified_base 177: mod_base = m5c
  modified_base 245: mod_base = m5c
  modified_base 255: mod_base = m5c
  modified_base 257: mod_base = m5c
  modified_base 281: mod_base = m5c
  modified_base 286: mod_base = m5c
  variation 149: note = CpG site, residue is C if methylated or T(=U) if unmethylated
tatagatatattattatttgggaatttgatattggtagtataattttgtaattttttaagagggtttaatttttttaaatgtaagtattagggttcgggattatttaaatagtttcgttttttttttgtttttttttaggggttatagygtgcggaaaagtgttttagatcgttgtcgtttttttatttttgaatttttttagtttttttttttatagtgattagttgtagaatagttttgggtcgggtgggtacgcgttattgaggtaattaattttggcgttacggagggttaaggat

SEQ ID NO: 3 - DNA, 300 bp, synthetic construct
  source 1..300: mol_type = other DNA
  modified_base 7..8: mod_base = OTHER; note = uracil
  modified_base 13..14: mod_base = OTHER; note = uracil
  modified_base 16: mod_base = OTHER; note = uracil
  modified_base 23: mod_base = OTHER; note = uracil
  modified_base 28: mod_base = OTHER; note = uracil
  modified_base 38: mod_base = OTHER; note = uracil
  modified_base 40: mod_base = OTHER; note = uracil
  modified_base 42: mod_base = OTHER; note = uracil
  modified_base 47..48: mod_base = OTHER; note = uracil
  modified_base 54: mod_base = OTHER; note = uracil
  modified_base 61..62: mod_base = OTHER; note = uracil
  modified_base 66: mod_base = OTHER; note = uracil
  modified_base 73: mod_base = OTHER; note = uracil
  modified_base 76: mod_base = OTHER; note = uracil
  modified_base 81: mod_base = OTHER; note = uracil
  modified_base 85: mod_base = OTHER; note = uracil
  modified_base 89..90: mod_base = OTHER; note = uracil
  modified_base 94: mod_base = OTHER; note = uracil
  modified_base 97..98: mod_base = OTHER; note = uracil
  modified_base 107: mod_base = OTHER; note = uracil
  modified_base 111: mod_base = OTHER; note = uracil
  modified_base 114: mod_base = OTHER; note = uracil
  modified_base 123: mod_base = OTHER; note = uracil
  modified_base 127: mod_base = OTHER; note = uracil
  modified_base 136: mod_base = OTHER; note = uracil
  modified_base 146: mod_base = OTHER; note = uracil
  modified_base 153..154: mod_base = OTHER; note = uracil
  modified_base 161: mod_base = OTHER; note = uracil
  modified_base 168: mod_base = OTHER; note = uracil
  modified_base 171..173: mod_base = OTHER; note = uracil
  modified_base 176: mod_base = OTHER; note = uracil
  modified_base 184: mod_base = OTHER; note = uracil
  modified_base 187..188: mod_base = OTHER; note = uracil
  modified_base 192..193: mod_base = OTHER; note = uracil
  modified_base 197: mod_base = OTHER; note = uracil
  modified_base 202..205: mod_base = OTHER; note = uracil
  modified_base 214..217: mod_base = OTHER; note = uracil
  modified_base 226..228: mod_base = OTHER; note = uracil
  modified_base 231: mod_base = OTHER; note = uracil
  modified_base 233..234: mod_base = OTHER; note = uracil
  modified_base 236..239: mod_base = OTHER; note = uracil
  modified_base 241: mod_base = OTHER; note = uracil
  modified_base 252: mod_base = OTHER; note = uracil
  modified_base 255: mod_base = OTHER; note = uracil
  modified_base 265: mod_base = OTHER; note = uracil
  modified_base 268: mod_base = OTHER; note = uracil
  modified_base 271: mod_base = OTHER; note = uracil
  modified_base 275: mod_base = OTHER; note = uracil
  modified_base 278..279: mod_base = OTHER; note = uracil
  modified_base 290..291: mod_base = OTHER; note = uracil
  modified_base 293: mod_base = OTHER; note = uracil
  modified_base 295: mod_base = OTHER; note = uracil
  modified_base 51: mod_base = m5c
  modified_base 99: mod_base = m5c
  modified_base 134: mod_base = m5c
  modified_base 159: mod_base = m5c
  modified_base 174: mod_base = m5c
  modified_base 194: mod_base = m5c
  modified_base 199: mod_base = m5c
  variation 151: note = CpG site, residue is C if methylated or T(=U) if unmethylated
gggtgattagtgttattaaaagtagagtttgagtttatttttataattatcggttgtgggttagatatttggttgttttgtaggtagattaggtttttcggtgagttatgttgtttaaaatgttgtttgggaacgtagagaaagtttaaaygttaagacgttgaggatagtttcgtaggtggattgttatgttcggttcggtttttttttggtttttagagtggattttttttttttttatagaggggaggtatttgatggtggttttagtagataatttggagaagaattatttagggt

SEQ ID NO: 4 - DNA, 300 bp, synthetic construct
  source 1..300: mol_type = other DNA
  modified_base 2..4: mod_base = OTHER; note = uracil
  modified_base 14: mod_base = OTHER; note = uracil
  modified_base 17: mod_base = OTHER; note = uracil
  modified_base 19..20: mod_base = OTHER; note = uracil
  modified_base 28: mod_base = OTHER; note = uracil
  modified_base 31: mod_base = OTHER; note = uracil
  modified_base 37..38: mod_base = OTHER; note = uracil
  modified_base 40..41: mod_base = OTHER; note = uracil
  modified_base 44: mod_base = OTHER; note = uracil
  modified_base 50..51: mod_base = OTHER; note = uracil
  modified_base 53..56: mod_base = OTHER; note = uracil
  modified_base 58: mod_base = OTHER; note = uracil
  modified_base 77..78: mod_base = OTHER; note = uracil
  modified_base 80: mod_base = OTHER; note = uracil
  modified_base 82: mod_base = OTHER; note = uracil
  modified_base 89..90: mod_base = OTHER; note = uracil
  modified_base 100: mod_base = OTHER; note = uracil
  modified_base 105: mod_base = OTHER; note = uracil
  modified_base 110: mod_base = OTHER; note = uracil
  modified_base 115: mod_base = OTHER; note = uracil
  modified_base 119..120: mod_base = OTHER; note = uracil
  modified_base 122..123: mod_base = OTHER; note = uracil
  modified_base 131: mod_base = OTHER; note = uracil
  modified_base 135..136: mod_base = OTHER; note = uracil
  modified_base 138: mod_base = OTHER; note = uracil
  modified_base 144: mod_base = OTHER; note = uracil
  modified_base 157: mod_base = OTHER; note = uracil
  modified_base 161: mod_base = OTHER; note = uracil
  modified_base 163: mod_base = OTHER; note = uracil
  modified_base 170..172: mod_base = OTHER; note = uracil
  modified_base 176: mod_base = OTHER; note = uracil
  modified_base 179: mod_base = OTHER; note = uracil
  modified_base 188: mod_base = OTHER; note = uracil
  modified_base 191: mod_base = OTHER; note = uracil
  modified_base 196: mod_base = OTHER; note = uracil
  modified_base 198: mod_base = OTHER; note = uracil
  modified_base 200: mod_base = OTHER; note = uracil
  modified_base 208..209: mod_base = OTHER; note = uracil
  modified_base 214: mod_base = OTHER; note = uracil
  modified_base 217..218: mod_base = OTHER; note = uracil
  modified_base 221: mod_base = OTHER; note = uracil
  modified_base 226: mod_base = OTHER; note = uracil
  modified_base 229..230: mod_base = OTHER; note = uracil
  modified_base 237: mod_base = OTHER; note = uracil
  modified_base 241..243: mod_base = OTHER; note = uracil
  modified_base 245: mod_base = OTHER; note = uracil
  modified_base 248: mod_base = OTHER; note = uracil
  modified_base 268: mod_base = OTHER; note = uracil
  modified_base 270: mod_base = OTHER; note = uracil
  modified_base 274: mod_base = OTHER; note = uracil
  modified_base 276: mod_base = OTHER; note = uracil
  modified_base 279: mod_base = OTHER; note = uracil
  modified_base 289: mod_base = OTHER; note = uracil
  modified_base 291: mod_base = OTHER; note = uracil
  modified_base 296: mod_base = OTHER; note = uracil
  modified_base 298..300: mod_base = OTHER; note = uracil
  modified_base 101: mod_base = m5c
  modified_base 106: mod_base = m5c
  modified_base 126: mod_base = m5c
  modified_base 141: mod_base = m5c
  modified_base 166: mod_base = m5c
  modified_base 201: mod_base = m5c
  modified_base 249: mod_base = m5c
  variation 149: note = CpG site, residue is C if methylated or T(=U) if unmethylated
attttgagtggtttttttttaggttgtttgttgaagttattattagatgttttttttttgtggggaggagaagggtttattttggggattaaaaaggggtcgagtcgggtatggtagtttatttgcggggttgtttttagcgttttggygtttagattttttttgcgtttttagatagtattttaagtagtatgatttatcgggaagtttggtttgtttgtaaagtagttaaatgtttggtttatagtcgatggttatgagagtaaatttaagttttgtttttagtggtattggttattt

SEQ ID NO: 5 - DNA, 300 bp, synthetic construct
  source 1..300: mol_type = other DNA
  modified_base 4: mod_base = OTHER; note = uracil
  modified_base 16: mod_base = OTHER; note = uracil
  modified_base 28: mod_base = OTHER; note = uracil
  modified_base 31: mod_base = OTHER; note = uracil
  modified_base 41: mod_base = OTHER; note = uracil
  modified_base 53: mod_base = OTHER; note = uracil
  modified_base 55: mod_base = OTHER; note = uracil
  modified_base 61: mod_base = OTHER; note = uracil
  modified_base 75: mod_base = OTHER; note = uracil
  modified_base 101: mod_base = OTHER; note = uracil
  modified_base 106: mod_base = OTHER; note = uracil
  modified_base 113: mod_base = OTHER; note = uracil
  modified_base 121: mod_base = OTHER; note = uracil
  modified_base 124: mod_base = OTHER; note = uracil
  modified_base 131..135: mod_base = OTHER; note = uracil
  modified_base 137..138: mod_base = OTHER; note = uracil
  modified_base 141..143: mod_base = OTHER; note = uracil
  modified_base 149: mod_base = OTHER; note = uracil
  modified_base 153: mod_base = OTHER; note = uracil
  modified_base 156: mod_base = OTHER; note = uracil
  modified_base 158: mod_base = OTHER; note = uracil
  modified_base 162..164: mod_base = OTHER; note = uracil
  modified_base 168..169: mod_base = OTHER; note = uracil
  modified_base 180: mod_base = OTHER; note = uracil
  modified_base 186: mod_base = OTHER; note = uracil
  modified_base 195: mod_base = OTHER; note = uracil
  modified_base 203: mod_base = OTHER; note = uracil
  modified_base 206: mod_base = OTHER; note = uracil
  modified_base 210..211: mod_base = OTHER; note = uracil
  modified_base 217: mod_base = OTHER; note = uracil
  modified_base 222..223: mod_base = OTHER; note = uracil
  modified_base 229: mod_base = OTHER; note = uracil
  modified_base 243: mod_base = OTHER; note = uracil
  modified_base 250..251: mod_base = OTHER; note = uracil
  modified_base 254: mod_base = OTHER; note = uracil
  modified_base 257..258: mod_base = OTHER; note = uracil
  modified_base 260: mod_base = OTHER; note = uracil
  modified_base 264: mod_base = OTHER; note = uracil
  modified_base 267: mod_base = OTHER; note = uracil
  modified_base 272..273: mod_base = OTHER; note = uracil
  modified_base 280..281: mod_base = OTHER; note = uracil
  modified_base 283: mod_base = OTHER; note = uracil
  modified_base 289: mod_base = OTHER; note = uracil
  modified_base 291..292: mod_base = OTHER; note = uracil
  modified_base 294: mod_base = OTHER; note = uracil
  modified_base 297: mod_base = OTHER; note = uracil
  modified_base 65: mod_base = m5c
  modified_base 80: mod_base = m5c
  modified_base 102: mod_base = m5c
  modified_base 114: mod_base = m5c
  modified_base 119: mod_base = m5c
  modified_base 139: mod_base = m5c
  modified_base 144: mod_base = m5c
  modified_base 154: mod_base = m5c
  modified_base 170: mod_base = m5c
  modified_base 173: mod_base = m5c
  modified_base 184: mod_base = m5c
  modified_base 187: mod_base = m5c
  modified_base 197: mod_base = m5c
  modified_base 201: mod_base = m5c
  modified_base 204: mod_base = m5c
  modified_base 224: mod_base = m5c
  modified_base 261: mod_base = m5c
  modified_base 265: mod_base = m5c
  modified_base 276: mod_base = m5c
  modified_base 285: mod_base = m5c
  modified_base 287: mod_base = m5c
  modified_base 295: mod_base = m5c
  modified_base 298: mod_base = m5c
  variation 150: note = CpG site, residue is C if methylated or T(=U) if unmethylated
cagttggggaggggatagggtaggtggttgtagaagggggttgggttgaggttttaggtgtagacgaggaggggttgggcggagggggtgaggaggggagtcgggttgggggtcggggcgttgttggggtttttttttcgtttcgggatygttcgtttttgtttagattcgtcggtaaatagacgtcgtgatgttacgggcgtcgttgatttgtggttgaattcggagttgtaaatgagatgtaaggtgttagtagttttcggtcgtagggtttacgagttatacgcgttttttcgtcgg

SEQ ID NO: 6 - DNA, 300 bp, synthetic construct
  source 1..300: mol_type = other DNA
  modified_base 1: mod_base = OTHER; note = uracil
  modified_base 22: mod_base = OTHER; note = uracil
  modified_base 30..32: mod_base = OTHER; note = uracil
  modified_base 38: mod_base = OTHER; note = uracil
  modified_base 45: mod_base = OTHER; note = uracil
  modified_base 48: mod_base = OTHER; note = uracil
  modified_base 52: mod_base = OTHER; note = uracil
  modified_base 54..55: mod_base = OTHER; note = uracil
  modified_base 59: mod_base = OTHER; note = uracil
  modified_base 62: mod_base = OTHER; note = uracil
  modified_base 64: mod_base = OTHER; note = uracil
  modified_base 70: mod_base = OTHER; note = uracil
  modified_base 73: mod_base = OTHER; note = uracil
  modified_base 75: mod_base = OTHER; note = uracil
  modified_base 82: mod_base = OTHER; note = uracil
  modified_base 85..86: mod_base = OTHER; note = uracil
  modified_base 88: mod_base = OTHER; note = uracil
  modified_base 93: mod_base = OTHER; note = uracil
  modified_base 101..102: mod_base = OTHER; note = uracil
  modified_base 108: mod_base = OTHER; note = uracil
  modified_base 111: mod_base = OTHER; note = uracil
  modified_base 119: mod_base = OTHER; note = uracil
  modified_base 126: mod_base = OTHER; note = uracil
  modified_base 135: mod_base = OTHER; note = uracil
  modified_base 140: mod_base = OTHER; note = uracil
  modified_base 154..155: mod_base = OTHER; note = uracil
  modified_base 172..175: mod_base = OTHER; note = uracil
  modified_base 178: mod_base = OTHER; note = uracil
  modified_base 183..185: mod_base = OTHER; note = uracil
  modified_base 189..193: mod_base = OTHER; note = uracil
  modified_base 196..197: mod_base = OTHER; note = uracil
  modified_base 201: mod_base = OTHER; note = uracil
  modified_base 203..206: mod_base = OTHER; note = uracil
  modified_base 208..209: mod_base = OTHER; note = uracil
  modified_base 211: mod_base = OTHER; note = uracil
  modified_base 213..217: mod_base = OTHER; note = uracil
  modified_base 219: mod_base = OTHER; note = uracil
  modified_base 222..224: mod_base = OTHER; note = uracil
  modified_base 227..230: mod_base = OTHER; note = uracil
  modified_base 232..233: mod_base = OTHER; note = uracil
  modified_base 238: mod_base = OTHER; note = uracil
  modified_base 241: mod_base = OTHER; note = uracil
  modified_base 243..244: mod_base = OTHER; note = uracil
  modified_base 250..251: mod_base = OTHER; note = uracil
  modified_base 253: mod_base = OTHER; note = uracil
  modified_base 256..258: mod_base = OTHER; note = uracil
  modified_base 261..265: mod_base = OTHER; note = uracil
  modified_base 268: mod_base = OTHER; note = uracil
  modified_base 271: mod_base = OTHER; note = uracil
  modified_base 274..275: mod_base = OTHER; note = uracil
  modified_base 277..278: mod_base = OTHER; note = uracil
  modified_base 281..283: mod_base = OTHER; note = uracil
  modified_base 287..290: mod_base = OTHER; note = uracil
  modified_base 292..295: mod_base = OTHER; note = uracil
  modified_base 298: mod_base = OTHER; note = uracil
  modified_base 2: mod_base = m5c
  modified_base 5: mod_base = m5c
  modified_base 13: mod_base = m5c
  modified_base 15: mod_base = m5c
  modified_base 24: mod_base = m5c
  modified_base 35: mod_base = m5c
  modified_base 39: mod_base = m5c
  modified_base 76: mod_base = m5c
  modified_base 96: mod_base = m5c
  modified_base 99: mod_base = m5c
  modified_base 103: mod_base = m5c
  modified_base 113: mod_base = m5c
  modified_base 116: mod_base = m5c
  modified_base 127: mod_base = m5c
  modified_base 130: mod_base = m5c
  modified_base 146: mod_base = m5c
  modified_base 156: mod_base = m5c
  modified_base 161: mod_base = m5c
  modified_base 181: mod_base = m5c
  modified_base 186: mod_base = m5c
  modified_base 198: mod_base = m5c
  modified_base 220: mod_base = m5c
  modified_base 235: mod_base = m5c
  variation 150: note = CpG site, residue is C if methylated or T(=U) if unmethylated
tcggcggaggagcgcgtgtggttcgtaggttttgcggtcggaggttgttggtattttgtattttatttatagtttcgggtttagttataggttagcggcgttcgtgatattacggcgtttgtttatcgacgggtttgggtaagagcggayggtttcggggcgggagggggattttagtagcgtttcggtttttagttcggtttttttttttatttttttcgtttagttttttttcgtttgtatttgagattttaatttagtttttttttgtagttatttattttgttttttttttagttg

SEQ ID NO: 7 - DNA, 300 bp, synthetic construct
  source 1..300: mol_type = other DNA
  modified_base 5: mod_base = OTHER; note = uracil
  modified_base 18: mod_base = OTHER; note = uracil
  modified_base 21..23: mod_base = OTHER; note = uracil
  modified_base 25: mod_base = OTHER; note = uracil
  modified_base 30: mod_base = OTHER; note = uracil
  modified_base 32: mod_base = OTHER; note = uracil
  modified_base 37: mod_base = OTHER; note = uracil
  modified_base 52: mod_base = OTHER; note = uracil
  modified_base 56: mod_base = OTHER; note = uracil
  modified_base 60: mod_base = OTHER; note = uracil
  modified_base 66..67: mod_base = OTHER; note = uracil
  modified_base 77: mod_base = OTHER; note = uracil
  modified_base 87..88: mod_base = OTHER; note = uracil
  modified_base 90: mod_base = OTHER; note = uracil
  modified_base 95: mod_base = OTHER; note = uracil
  modified_base 100: mod_base = OTHER; note = uracil
  modified_base 118: mod_base = OTHER; note = uracil
  modified_base 127: mod_base = OTHER; note = uracil
  modified_base 130: mod_base = OTHER; note = uracil
  modified_base 132: mod_base = OTHER; note = uracil
  modified_base 140: mod_base = OTHER; note = uracil
  modified_base 154: mod_base = OTHER; note = uracil
  modified_base 164: mod_base = OTHER; note = uracil
  modified_base 166: mod_base = OTHER; note = uracil
  modified_base 170: mod_base = OTHER; note = uracil
  modified_base 175: mod_base = OTHER; note = uracil
  modified_base 177..178: mod_base = OTHER; note = uracil
  modified_base 181..182: mod_base = OTHER; note = uracil
  modified_base 184..186: mod_base = OTHER; note = uracil
  modified_base 189..191: mod_base = OTHER; note = uracil
  modified_base 193..194: mod_base = OTHER; note = uracil
  modified_base 201: mod_base = OTHER; note = uracil
  modified_base 203: mod_base = OTHER; note = uracil
  modified_base 208: mod_base = OTHER; note = uracil
  modified_base 211..212: mod_base = OTHER; note = uracil
  modified_base 220: mod_base = OTHER; note = uracil
  modified_base 235..236: mod_base = OTHER; note = uracil
  modified_base 239: mod_base = OTHER; note = uracil
  modified_base 243: mod_base = OTHER; note = uracil
  modified_base 251: mod_base = OTHER; note = uracil
  modified_base 256: mod_base = OTHER; note = uracil
  modified_base 261: mod_base = OTHER; note = uracil
  modified_base 266..267: mod_base = OTHER; note = uracil
  modified_base 270: mod_base = OTHER; note = uracil
  modified_base 273..274: mod_base = OTHER; note = uracil
  modified_base 278..282: mod_base = OTHER; note = uracil
  modified_base 285..287: mod_base = OTHER; note = uracil
  modified_base 289..290: mod_base = OTHER; note = uracil
  modified_base 292..294: mod_base = OTHER; note = uracil
  modified_base 296..298: mod_base = OTHER; note = uracil
  modified_base 300: mod_base = OTHER; note = uracil
  modified_base 19: mod_base = m5c
  modified_base 53: mod_base = m5c
  modified_base 61: mod_base = m5c
  modified_base 124: mod_base = m5c
  modified_base 133: mod_base = m5c
  modified_base 195: mod_base = m5c
  modified_base 252: mod_base = m5c
  modified_base 258: mod_base = m5c
  modified_base 275: mod_base = m5c
  variation 141: note = CpG site, residue is C if methylated or T(=U) if unmethylated
  variation 158: note = CpG site, residue is C if methylated or T(=U) if unmethylated
  variation 161: note = CpG site, residue is C if methylated or T(=U) if unmethylated
ttttttgtaaaatggggtcgtttataaaatttataataaagtgttgaggtttcgataagtcgaaatttgtgaaaagtttgtgtaaattttagagttgtatatggatggttgaaggatttatttcgatagtttcggggagtygtgggagggaagttgayggyggtttttgttgtttttttattttttagttttttcgaagattttgagtagtttggagattaaaggtgattggggtttgttggtatggaggtcgggttcggtagaatttgtttttcggttttttgtttattttttatttat

SEQ ID NO: 8 - DNA, 300 bp, synthetic construct
  source 1..300: mol_type = other DNA
  modified_base 17: mod_base = OTHER; note = uracil
  modified_base 24: mod_base = OTHER; note = uracil
  modified_base 32: mod_base = OTHER; note = uracil
  modified_base 38: mod_base = OTHER; note = uracil
  modified_base 41: mod_base = OTHER; note = uracil
  modified_base 46..47: mod_base = OTHER; note = uracil
  modified_base 51..52: mod_base = OTHER; note = uracil
  modified_base 54..55: mod_base = OTHER; note = uracil
  modified_base 59..60: mod_base = OTHER; note = uracil
  modified_base 63: mod_base = OTHER; note = uracil
  modified_base 67..70: mod_base = OTHER; note = uracil
  modified_base 74: mod_base = OTHER; note = uracil
  modified_base 76..77: mod_base = OTHER; note = uracil
  modified_base 84: mod_base = OTHER; note = uracil
  modified_base 86..87: mod_base = OTHER; note = uracil
  modified_base 91: mod_base = OTHER; note = uracil
  modified_base 94: mod_base = OTHER; note = uracil
  modified_base 96: mod_base = OTHER; note = uracil
  modified_base 102: mod_base = OTHER; note = uracil
  modified_base 113: mod_base = OTHER; note = uracil
  modified_base 129: mod_base = OTHER; note = uracil
  modified_base 132: mod_base = OTHER; note = uracil
  modified_base 138: mod_base = OTHER; note = uracil
  modified_base 141: mod_base = OTHER; note = uracil
  modified_base 145: mod_base = OTHER; note = uracil
  modified_base 148: mod_base = OTHER; note = uracil
  modified_base 151..153: mod_base = OTHER; note = uracil
  modified_base 155..157: mod_base = OTHER; note = uracil
  modified_base 162: mod_base = OTHER; note = uracil
  modified_base 164..166: mod_base = OTHER; note = uracil
  modified_base 172: mod_base = OTHER; note = uracil
  modified_base 186..187: mod_base = OTHER; note = uracil
  modified_base 190: mod_base = OTHER; note = uracil
  modified_base 193..194: mod_base = OTHER; note = uracil
  modified_base 197..198: mod_base = OTHER; note = uracil
  modified_base 204: mod_base = OTHER; note = uracil
  modified_base 207: mod_base = OTHER; note = uracil
  modified_base 209: mod_base = OTHER; note = uracil
  modified_base 219: mod_base = OTHER; note = uracil
  modified_base 221: mod_base = OTHER; note = uracil
  modified_base 225: mod_base = OTHER; note = uracil
  modified_base 230: mod_base = OTHER; note = uracil
  modified_base 232: mod_base = OTHER; note = uracil
  modified_base 242: mod_base = OTHER; note = uracil
  modified_base 252..253: mod_base = OTHER; note = uracil
  modified_base 255: mod_base = OTHER; note = uracil
  modified_base 258: mod_base = OTHER; note = uracil
  modified_base 260: mod_base = OTHER; note = uracil
  modified_base 284..287: mod_base = OTHER; note = uracil
  modified_base 294: mod_base = OTHER; note = uracil
  modified_base 25: mod_base = m5c
  modified_base 42: mod_base = m5c
  modified_base 48: mod_base = m5c
  modified_base 105: mod_base = m5c
  modified_base 167: mod_base = m5c
  modified_base 176: mod_base = m5c
  modified_base 239: mod_base = m5c
  modified_base 247: mod_base = m5c
  modified_base 281: mod_base = m5c
  variation 139: note = CpG site, residue is C if methylated or T(=U) if unmethylated
  variation 142: note = CpG site, residue is C if methylated or T(=U) if unmethylated
  variation 159: note = CpG site, residue is C if methylated or T(=U) if unmethylated
gtgggtgggaggtgggtagggggtcgggaagtaggttttgtcgagttcggtttttatgttagtaggttttaattatttttgatttttaggttgtttagagttttcgggagggttgggaggtaggagaatagtaagagtygtygttagttttttttttayggtttttcggagttgtcgaaatagattttttaattatttatgtatagttttgaggtttatataagttttttataggtttcggtttgtcggaattttaatattttgttatgagttttgtgggcggttttattttatagaaaa

SEQ ID NO: 9 - DNA, 300 bp, synthetic construct
  source 1..300: mol_type = other DNA
  modified_base 5: mod_base = OTHER; note = uracil
  modified_base 13: mod_base = OTHER; note = uracil
  modified_base 18..20: mod_base = OTHER; note = uracil
  modified_base 28: mod_base = OTHER; note = uracil
  modified_base 30: mod_base = OTHER; note = uracil
  modified_base 43..44: mod_base = OTHER; note = uracil
  modified_base 46..47: mod_base = OTHER; note = uracil
  modified_base 54..55: mod_base = OTHER; note = uracil
  modified_base 58..59: mod_base = OTHER; note = uracil
  modified_base 62..63: mod_base = OTHER; note = uracil
  modified_base 67: mod_base = OTHER; note = uracil
  modified_base 69: mod_base = OTHER; note = uracil
  modified_base 75..76: mod_base = OTHER; note = uracil
  modified_base 80: mod_base = OTHER; note = uracil
  modified_base 86: mod_base = OTHER; note = uracil
  modified_base 88: mod_base = OTHER; note = uracil
  modified_base 90..91: mod_base = OTHER; note = uracil
  modified_base 97: mod_base = OTHER; note = uracil
  modified_base 99: mod_base = OTHER; note = uracil
  modified_base 101..102: mod_base = OTHER; note = uracil
  modified_base 112: mod_base = OTHER; note = uracil
  modified_base 117: mod_base = OTHER; note = uracil
  modified_base 121..123: mod_base = OTHER; note = uracil
  modified_base 131: mod_base = OTHER; note = uracil
  modified_base 135: mod_base = OTHER; note = uracil
  modified_base 139..140: mod_base = OTHER; note = uracil
  modified_base 145: mod_base = OTHER; note = uracil
  modified_base 148: mod_base = OTHER; note = uracil
  modified_base 150: mod_base = OTHER; note = uracil
  modified_base 155: mod_base = OTHER; note = uracil
  modified_base 163: mod_base = OTHER; note = uracil
  modified_base 169: mod_base = OTHER; note = uracil
  modified_base 171: mod_base = OTHER; note = uracil
  modified_base 177: mod_base = OTHER; note = uracil
  modified_base 180: mod_base = OTHER; note = uracil
  modified_base 182..183: mod_base = OTHER; note = uracil
  modified_base 185: mod_base = OTHER; note = uracil
  modified_base 189: mod_base = OTHER; note = uracil
  modified_base 194..196: mod_base = OTHER; note = uracil
  modified_base 205..206: mod_base = OTHER; note = uracil
  modified_base 211..212: mod_base = OTHER; note = uracil
  modified_base 218..219: mod_base = OTHER; note = uracil
  modified_base 222..225: mod_base = OTHER; note = uracil
  modified_base 227: mod_base = OTHER; note = uracil
  modified_base 234: mod_base = OTHER; note = uracil
  modified_base 237: mod_base = OTHER; note = uracil
  modified_base 247: mod_base = OTHER; note = uracil
  modified_base 249: mod_base = OTHER; note = uracil
  modified_base 255: mod_base = OTHER; note = uracil
  modified_base 261..263: mod_base = OTHER; note = uracil
  modified_base 275: mod_base = OTHER; note = uracil
  modified_base 280..281: mod_base = OTHER; note = uracil
  modified_base 284..288: mod_base = OTHER; note = uracil
  modified_base 296..299: mod_base = OTHER; note = uracil
  modified_base 16: mod_base = m5c
  modified_base 124: mod_base = m5c
  modified_base 186: mod_base = m5c
  modified_base 220: mod_base = m5c
  modified_base 259: mod_base = m5c
  modified_base 268: mod_base = m5c
  modified_base 273: mod_base = m5c
  variation 151: note = CpG site, residue is C if methylated or T(=U) if unmethylated
tgagtagtgttttagcgtttagagagatattgtggagaaggtttattaggatgtttatttgttttatataagagtttaattttggtatatttgtggtatatttgtggagagttgttttggtttcggttgtttggtaggtttgggttatttygagtaggggaattggggtatagtggttgtattttcggttatattttggtttttttagtttttgatgttcgttttttaggtggtagtatgaggtgatttagggatagacgtttttatcgtgacgtaagtttagtttttagtggagttttt

SEQ ID NO: 10 - DNA, 300 bp, synthetic construct
  source 1..300: mol_type = other DNA
  modified_base 6: mod_base = OTHER; note = uracil
  modified_base 8..9: mod_base = OTHER; note = uracil
  modified_base 11: mod_base = OTHER; note = uracil
  modified_base 18: mod_base = OTHER; note = uracil
  modified_base 23: mod_base = OTHER; note = uracil
  modified_base 30: mod_base = OTHER; note = uracil
  modified_base 44: mod_base = OTHER; note = uracil
  modified_base 48..50: mod_base = OTHER; note = uracil
  modified_base 56: mod_base = OTHER; note = uracil
  modified_base 58..59: mod_base = OTHER; note = uracil
  modified_base 61: mod_base = OTHER; note = uracil
  modified_base 65: mod_base = OTHER; note = uracil
  modified_base 68..69: mod_base = OTHER; note = uracil
  modified_base 71..72: mod_base = OTHER; note = uracil
  modified_base 84: mod_base = OTHER; note = uracil
  modified_base 87: mod_base = OTHER; note = uracil
  modified_base 93: mod_base = OTHER; note = uracil
  modified_base 102..103: mod_base = OTHER; note = uracil
  modified_base 113: mod_base = OTHER; note = uracil
  modified_base 122: mod_base = OTHER; note = uracil
  modified_base 125..126: mod_base = OTHER; note = uracil
  modified_base 128: mod_base = OTHER; note = uracil
  modified_base 133..136: mod_base = OTHER; note = uracil
  modified_base 141..144: mod_base = OTHER; note = uracil
  modified_base 147: mod_base = OTHER; note = uracil
  modified_base 157..159: mod_base = OTHER; note = uracil
  modified_base 163..164: mod_base = OTHER; note = uracil
  modified_base 167..168: mod_base = OTHER; note = uracil
  modified_base 172: mod_base = OTHER; note = uracil
  modified_base 175: mod_base = OTHER; note = uracil
  modified_base 181..182: mod_base = OTHER; note = uracil
  modified_base 187: mod_base = OTHER; note = uracil
  modified_base 190: mod_base = OTHER; note = uracil
  modified_base 192: mod_base = OTHER; note = uracil
  modified_base 194..195: mod_base = OTHER; note = uracil
  modified_base 197: mod_base = OTHER; note = uracil
  modified_base 205..206: mod_base = OTHER; note = uracil
  modified_base 208: mod_base = OTHER; note = uracil
  modified_base 216..217: mod_base = OTHER; note = uracil
  modified_base 227: mod_base = OTHER; note = uracil
  modified_base 229: mod_base = OTHER; note = uracil
  modified_base 240: mod_base = OTHER; note = uracil
  modified_base 248: mod_base = OTHER; note = uracil
  modified_base 251..252: mod_base = OTHER; note = uracil
  modified_base 260..261: mod_base = OTHER; note = uracil
  modified_base 264: mod_base = OTHER; note = uracil
  modified_base 266..267: mod_base = OTHER; note = uracil
  modified_base 269: mod_base = OTHER; note = uracil
  modified_base 275: mod_base = OTHER; note = uracil
  modified_base 277: mod_base = OTHER; note = uracil
  modified_base 279: mod_base = OTHER; note = uracil
  modified_base 286: mod_base = OTHER; note = uracil
  modified_base 292: mod_base = OTHER; note = uracil
  modified_base 294: mod_base = OTHER; note = uracil
  modified_base 297: mod_base = OTHER; note = uracil
  modified_base 299: mod_base = OTHER; note = uracil
  modified_base 27: mod_base = m5c
  modified_base 32: mod_base = m5c
  modified_base 41: mod_base = m5c
  modified_base 80: mod_base = m5c
  modified_base 114: mod_base = m5c
  modified_base 176: mod_base = m5c
  modified_base 284: mod_base = m5c
  variation 149: note = CpG site, residue is C if methylated or T(=U) if unmethylated
aggggttttattgggggttggatttgcgttacgataagggcgtttgtttttgagttattttatgttgttatttgaggggcgggtattaggaattggaaaaattagggtatagtcggaggtgtagttattgtgttttagtttttttgttyggagtagtttaggtttgttagataatcggggttagaatagttttttataggtgtgttataggtgtgttaaagttaggtttttgtgtaaggtaggtaggtattttggtggattttttttatagtgtttttttgggcgttgaaatattgttta

SEQ ID NO: 11 - DNA, 300 bp, synthetic construct
  source 1..300: mol_type = other DNA
  modified_base 2: mod_base = OTHER; note = uracil
  modified_base 13..14: mod_base = OTHER; note = uracil
  modified_base 19..20: mod_base = OTHER; note = uracil
  modified_base 28..30: mod_base = OTHER; note = uracil
  modified_base 35: mod_base = OTHER; note = uracil
  modified_base 38: mod_base = OTHER; note = uracil
  modified_base 49: mod_base = OTHER; note = uracil
  modified_base 52: mod_base = OTHER; note = uracil
  modified_base 57: mod_base = OTHER; note = uracil
  modified_base 62: mod_base = OTHER; note = uracil
  modified_base 67..69: mod_base = OTHER; note = uracil
  modified_base 74: mod_base = OTHER; note = uracil
  modified_base 77: mod_base = OTHER; note = uracil
  modified_base 79: mod_base = OTHER; note = uracil
  modified_base 84..85: mod_base = OTHER; note = uracil
  modified_base 87: mod_base = OTHER; note = uracil
  modified_base 93: mod_base = OTHER; note = uracil
  modified_base 96: mod_base = OTHER; note = uracil
  modified_base 99: mod_base = OTHER; note = uracil
  modified_base 128: mod_base = OTHER; note = uracil
  modified_base 131: mod_base = OTHER; note = uracil
  modified_base 145..147: mod_base = OTHER; note = uracil
  modified_base 149: mod_base = OTHER; note = uracil
  modified_base 156: mod_base = OTHER; note = uracil
  modified_base 163: mod_base = OTHER; note = uracil
  modified_base 168: mod_base = OTHER; note = uracil
  modified_base 170: mod_base = OTHER; note = uracil
  modified_base 175: mod_base = OTHER; note = uracil
  modified_base 178: mod_base = OTHER; note = uracil
  modified_base 182: mod_base = OTHER; note = uracil
  modified_base 188..189: mod_base = OTHER; note = uracil
  modified_base 191: mod_base = OTHER; note = uracil
  modified_base 193: mod_base = OTHER; note = uracil
  modified_base 196: mod_base = OTHER; note = uracil
  modified_base 199..200: mod_base = OTHER; note = uracil
  modified_base 208: mod_base = OTHER; note = uracil
  modified_base 214: mod_base = OTHER; note = uracil
  modified_base 223: mod_base = OTHER; note = uracil
  modified_base 229..230: mod_base = OTHER; note = uracil
  modified_base 240: mod_base = OTHER; note = uracil
  modified_base 242..243: mod_base = OTHER; note = uracil
  modified_base 255: mod_base = OTHER; note = uracil
  modified_base 259: mod_base = OTHER; note = uracil
  modified_base 270: mod_base = OTHER; note = uracil
  modified_base 277: mod_base = OTHER; note = uracil
  modified_base 282..283: mod_base = OTHER; note = uracil
  modified_base 291: mod_base = OTHER; note = uracil
  modified_base 293: mod_base = OTHER; note = uracil
  modified_base 298: mod_base = OTHER; note = uracil
  modified_base 300: mod_base = OTHER; note = uracil
  modified_base 41: mod_base = m5c
  modified_base 80: mod_base = m5c
  modified_base 231: mod_base = m5c
  modified_base 245: mod_base = m5c
  modified_base 247: mod_base = m5c
  modified_base 295: mod_base = m5c
  variation 151: note = CpG site, residue is C if methylated or T(=U) if unmethylated
ttttgtaaaattttagagttaggtatatttaattttgtaacgtggtagttgtatgattgtataagttttttaatagtatcgggttttagtgatattatttgttaaatgggttggtgatgataatggttagtatttatggaggagtttatayggtgttaagtgttttatatatattagttaattgaatttttattgttgttaatgagataggtattattgaattagaggttcggagagagttttacgcggttggttatattggtgaagagtttggtttaatgtttggtgaattttcggtat

SEQ ID NO: 12 - DNA, 300 bp, synthetic construct
  source 1..300: mol_type = other DNA
  modified_base 4: mod_base = OTHER; note = uracil
  modified_base 13: mod_base = OTHER; note = uracil
  modified_base 15..16: mod_base = OTHER; note = uracil
  modified_base 20: mod_base = OTHER; note = uracil
  modified_base 27..28: mod_base = OTHER; note = uracil
  modified_base 32: mod_base = OTHER; note = uracil
  modified_base 34: mod_base = OTHER; note = uracil
  modified_base 37: mod_base = OTHER; note = uracil
  modified_base 39..40: mod_base = OTHER; note = uracil
  modified_base 48..49: mod_base = OTHER; note = uracil
  modified_base 52: mod_base = OTHER; note = uracil
  modified_base 62: mod_base = OTHER; note = uracil
  modified_base 64: mod_base = OTHER; note = uracil
  modified_base 66: mod_base = OTHER; note = uracil
  modified_base 68: mod_base = OTHER; note = uracil
  modified_base 73..74: mod_base = OTHER; note = uracil
  modified_base 76: mod_base = OTHER; note = uracil
  modified_base 82: mod_base = OTHER; note = uracil
  modified_base 90..91: mod_base = OTHER; note = uracil
  modified_base 95: mod_base = OTHER; note = uracil
  modified_base 97: mod_base = OTHER; note = uracil
  modified_base 103: mod_base = OTHER; note = uracil
  modified_base 106: mod_base = OTHER; note = uracil
  modified_base 117: mod_base = OTHER; note = uracil
  modified_base 124: mod_base = OTHER; note = uracil
  modified_base 139: mod_base = OTHER; note = uracil
  modified_base 141: mod_base = OTHER; note = uracil
  modified_base 146: mod_base = OTHER; note = uracil
  modified_base 148: mod_base = OTHER; note = uracil
  modified_base 157: mod_base = OTHER; note = uracil
  modified_base 159..160: mod_base = OTHER; note = uracil
  modified_base 162..163: mod_base = OTHER; note = uracil
  modified_base 171: mod_base = OTHER; note = uracil
  modified_base 175..176: mod_base = OTHER; note = uracil
  modified_base 182: mod_base = OTHER; note = uracil
  modified_base 185: mod_base = OTHER; note = uracil
  modified_base 187..188: mod_base = OTHER; note = uracil
  modified_base 191..193: mod_base = OTHER; note = uracil
  modified_base 200: mod_base = OTHER; note = uracil
  modified_base 210: mod_base = OTHER; note = uracil
  modified_base 212: mod_base = OTHER; note = uracil
  modified_base 218..219: mod_base = OTHER; note = uracil
  modified_base 225: mod_base = OTHER; note = uracil
  modified_base 236: mod_base = OTHER; note = uracil
  modified_base 242: mod_base = OTHER; note = uracil
  modified_base 246: mod_base = OTHER; note = uracil
  modified_base 250: mod_base = OTHER; note = uracil
  modified_base 253: mod_base = OTHER; note = uracil
  modified_base 256..257: mod_base = OTHER; note = uracil
  modified_base 264: mod_base = OTHER; note = uracil
  modified_base 278..279: mod_base = OTHER; note = uracil
  modified_base 283: mod_base = OTHER; note = uracil
  modified_base 285: mod_base = OTHER; note = uracil
  modified_base 296: mod_base = OTHER; note = uracil
  modified_base 5: mod_base = m5c
  modified_base 53: mod_base = m5c
  modified_base 55: mod_base = m5c
  modified_base 69: mod_base = m5c
  modified_base 220: mod_base = m5c
  modified_base 259: mod_base = m5c
  variation 149: note = CpG site, residue is C if methylated or T(=U) if unmethylated
gtgtcgagagtttattaggtattgaattaagttttttattagtatgattaatcgcgtggagtttttttcgggtttttgatttaatagtatttgttttattggtagtagtgaggatttagttagttgatatgtgtaaagtatttagtatygtgtgggtttttttataaatgttgattattattattattaatttatttaatagatgatgttattgaggttcggtgttgttaagggatttgtatagttatgtagttattacgttgtagaattgggtatatttggttttggaattttataaga

SEQ ID NO: 13 - DNA, 300 bp, synthetic construct
  source 1..300: mol_type = other DNA
  modified_base 2: mod_base = OTHER; note = uracil
  modified_base 8..9: mod_base = OTHER; note = uracil
  modified_base 16: mod_base = OTHER; note = uracil
  modified_base 24: mod_base = OTHER; note = uracil
  modified_base 30..31: mod_base = OTHER; note = uracil
  modified_base 38: mod_base = OTHER; note = uracil
  modified_base 41: mod_base = OTHER; note = uracil
  modified_base 43: mod_base = OTHER; note = uracil
  modified_base 46: mod_base = OTHER; note = uracil
  modified_base 54: mod_base = OTHER; note = uracil
  modified_base 59: mod_base = OTHER; note = uracil
  modified_base 62: mod_base = OTHER; note = uracil
  modified_base 66..67: mod_base = OTHER; note = uracil
  modified_base 70..71: mod_base = OTHER; note = uracil
  modified_base 77: mod_base = OTHER; note = uracil
  modified_base 83..84: mod_base = OTHER; note = uracil
  modified_base 89: mod_base = OTHER; note = uracil
  modified_base 105..108: mod_base = OTHER; note = uracil
  modified_base 122: mod_base = OTHER; note = uracil
  modified_base 130: mod_base = OTHER; note = uracil
  modified_base 136: mod_base = OTHER; note = uracil
  modified_base 138..139: mod_base = OTHER; note = uracil
  modified_base 141..142: mod_base = OTHER; note = uracil
  modified_base 146: mod_base = OTHER; note = uracil
  modified_base 158..159: mod_base = OTHER; note = uracil
  modified_base 162: mod_base = OTHER; note = uracil
  modified_base 164: mod_base = OTHER; note = uracil
  modified_base 166..168: mod_base = OTHER; note = uracil
  modified_base 170..172: mod_base = OTHER; note = uracil
  modified_base 180: mod_base = OTHER; note = uracil
  modified_base 184: mod_base = OTHER; note = uracil
  modified_base 187..188: mod_base = OTHER; note = uracil
  modified_base 190..192: mod_base = OTHER; note = uracil
  modified_base 194..195: mod_base = OTHER; note = uracil
  modified_base 198: mod_base = OTHER; note = uracil
  modified_base 201..203: mod_base = OTHER; note = uracil
  modified_base 206..207: mod_base = OTHER; note = uracil
  modified_base 209: mod_base = OTHER; note = uracil
  modified_base 215..216: mod_base = OTHER; note = uracil
  modified_base 219: mod_base = OTHER; note = uracil
  modified_base 221..222: mod_base = OTHER; note = uracil
  modified_base 231: mod_base = OTHER; note = uracil
  modified_base 238: mod_base = OTHER; note = uracil
  modified_base 240: mod_base = OTHER; note = uracil
  modified_base 246: mod_base = OTHER; note = uracil
  modified_base 254..255: mod_base = OTHER; note = uracil
  modified_base 258: mod_base = OTHER; note = uracil
  modified_base 261: mod_base = OTHER; note = uracil
  modified_base 264..265: mod_base = OTHER; note = uracil
  modified_base 270: mod_base = OTHER; note = uracil
  modified_base 273..274: mod_base = OTHER; note = uracil
  modified_base 277: mod_base = OTHER; note = uracil
  modified_base 280: mod_base = OTHER; note = uracil
  modified_base 295: mod_base = OTHER; note = uracil
  modified_base 298: mod_base = OTHER; note = uracil
  modified_base 3: mod_base = m5c
  modified_base 25: mod_base = m5c
  modified_base 74: mod_base = m5c
  modified_base 97: mod_base = m5c
  modified_base 101: mod_base = m5c
  modified_base 116: mod_base = m5c
  modified_base 123: mod_base = m5c
  modified_base 131: mod_base = m5c
  modified_base 181: mod_base = m5c
  modified_base 226: mod_base = m5c
  modified_base 267: mod_base = m5c
  modified_base 283: mod_base = m5c
  variation 151: note = CpG site, residue is C if methylated or T(=U) if unmethylated
ttcggagttagtgaatttgtgattcggagttagttaattttatagttaatgtgttgagtagtattttagttagcgtttgaagttagagtagggaggcggacgggttttaggagttcgaggttcgggaagtcgaagtattattaaattgagygaggttttaatttttttttttaggaggttcggttgttttttattagtagtttaattatagggttttgttttagacgttattatttttttttttttagtgtgtttagtagtaatttcgattgttaataataacgtgaaaaataattgtag

SEQ ID NO: 14 - DNA, 300 bp, synthetic construct
  source 1..300: mol_type = other DNA
  modified_base 1: mod_base = OTHER; note = uracil
  modified_base 4: mod_base = OTHER; note = uracil
  modified_base 15: mod_base = OTHER; note = uracil
  modified_base 29: mod_base = OTHER; note = uracil
  modified_base 41: mod_base = OTHER; note = uracil
  modified_base 44: mod_base = OTHER; note = uracil
  modified_base 49: mod_base = OTHER; note = uracil
  modified_base 51: mod_base = OTHER; note = uracil
  modified_base 53: mod_base = OTHER; note = uracil
  modified_base 77: mod_base = OTHER; note = uracil
  modified_base 83: mod_base = OTHER; note = uracil
  modified_base 88..90: mod_base = OTHER; note = uracil
  modified_base 101: mod_base = OTHER; note = uracil
  modified_base 104: mod_base = OTHER; note = uracil
  modified_base 115: mod_base = OTHER; note = uracil
  modified_base 118: mod_base = OTHER; note = uracil
  modified_base 123..124: mod_base = OTHER; note = uracil
  modified_base 126..127: mod_base = OTHER; note = uracil
  modified_base 146..147: mod_base = OTHER; note = uracil
  modified_base 151: mod_base = OTHER; note = uracil
  modified_base 153: mod_base = OTHER; note = uracil
  modified_base 166: mod_base = OTHER; note = uracil
  modified_base 172: mod_base = OTHER; note = uracil
  modified_base 175..176: mod_base = OTHER; note = uracil
  modified_base 181..182: mod_base = OTHER; note = uracil
  modified_base 188: mod_base = OTHER; note = uracil
  modified_base 190..191: mod_base = OTHER; note = uracil
  modified_base 197..198: mod_base = OTHER; note = uracil
  modified_base 202: mod_base = OTHER; note = uracil
  modified_base 205..206: mod_base = OTHER; note = uracil
  modified_base 208..210: mod_base = OTHER; note = uracil
  modified_base 213: mod_base = OTHER; note = uracil
  modified_base 215: mod_base = OTHER; note = uracil
  modified_base 219: mod_base = OTHER; note = uracil
  modified_base 222: mod_base = OTHER; note = uracil
  modified_base 228: mod_base = OTHER; note = uracil
  modified_base 232: mod_base = OTHER; note = uracil
  modified_base 240: mod_base = OTHER; note = uracil
  modified_base 243: mod_base = OTHER; note = uracil
  modified_base 245: mod_base = OTHER; note = uracil
  modified_base 248: mod_base = OTHER; note = uracil
  modified_base 250: mod_base = OTHER; note = uracil
  modified_base 256: mod_base = OTHER; note = uracil
  modified_base 268: mod_base = OTHER; note = uracil
  modified_base 272: mod_base = OTHER; note = uracil
  modified_base 274: mod_base = OTHER; note = uracil
  modified_base 280: mod_base = OTHER; note = uracil
  modified_base 282: mod_base = OTHER; note = uracil
  modified_base 288: mod_base = OTHER; note = uracil
  modified_base 290: mod_base = OTHER; note = uracil
  modified_base 294: mod_base = OTHER; note = uracil
  modified_base 296: mod_base = OTHER; note = uracil
  modified_base 17: mod_base = m5c
  modified_base 33: mod_base = m5c
  modified_base 74: mod_base = m5c
  modified_base 119: mod_base = m5c
  modified_base 169: mod_base = m5c
  modified_base 177: mod_base = m5c
  modified_base 184: mod_base = m5c
  modified_base 199: mod_base = m5c
  modified_base 203: mod_base = m5c
  modified_base 226: mod_base = m5c
  modified_base 275: mod_base = m5c
  modified_base 297: mod_base = m5c
  variation 149: note = CpG site, residue is C if methylated or T(=U) if unmethylated
ttgtagttattttttacgttgttgttggtagtcgaggttgttgttggatatattgaaaaagagaaaatagtaacgtttggagtaggattttgtggttgggttgttggtgggaggtagtcggattttttgggagggagagttggaatttygtttagtttggtggtgtttcggtttttcggatttcgaatttttggggttcgttcgtttttttgttttggttttagacgttggttggaatgttgtttagtatattagttgtgaagttaattggtttcggattataagtttattggtttcgga

SEQ ID NO: 15 - DNA, 300 bp, synthetic construct
  source 1..300: mol_type = other DNA
  modified_base 4..5: mod_base = OTHER; note = uracil
  modified_base 10: mod_base = OTHER; note = uracil
  modified_base 17: mod_base = OTHER; note = uracil
  modified_base 20..21: mod_base = OTHER; note = uracil
  modified_base 28..31: mod_base = OTHER; note = uracil
  modified_base 33: mod_base = OTHER; note = uracil
  modified_base 50..51: mod_base = OTHER; note = uracil
  modified_base 63: mod_base = OTHER; note = uracil
  modified_base 65: mod_base = OTHER; note = uracil
  modified_base 69: mod_base = OTHER; note = uracil
  modified_base 77..79: mod_base = OTHER; note = uracil
  modified_base 82: mod_base = OTHER; note = uracil
  modified_base 84: mod_base = OTHER; note = uracil
  modified_base 94: mod_base = OTHER; note = uracil
  modified_base 100: mod_base = OTHER; note = uracil
  modified_base 109: mod_base = OTHER; note = uracil
  modified_base 111: mod_base = OTHER; note = uracil
  modified_base 119: mod_base = OTHER; note = uracil
  modified_base 132..133: mod_base = OTHER; note = uracil
  modified_base 136..137: mod_base = OTHER; note = uracil
  modified_base 141..142: mod_base = OTHER; note = uracil
  modified_base 145: mod_base = OTHER; note = uracil
  modified_base 155..157: mod_base = OTHER; note = uracil
  modified_base 161: mod_base = OTHER; note = uracil
  modified_base 163: mod_base = OTHER; note = uracil
  modified_base 166: mod_base = OTHER; note = uracil
  modified_base 175: mod_base = OTHER; note = uracil
  modified_base 185: mod_base = OTHER; note = uracil
  modified_base 198: mod_base = OTHER; note = uracil
  modified_base 204..205: mod_base = OTHER; note = uracil
  modified_base 212..214: mod_base = OTHER; note = uracil
  modified_base 217: mod_base = OTHER; note = uracil
  modified_base 220: mod_base = OTHER; note = uracil
  modified_base 229: mod_base = OTHER; note = uracil
  modified_base 235: mod_base = OTHER; note = uracil
  modified_base 239: mod_base = OTHER; note = uracil
  modified_base 246: mod_base = OTHER; note = uracil
  modified_base 252..253: mod_base = OTHER; note = uracil
  modified_base 268: mod_base = OTHER; note = uracil
  modified_base 270: mod_base = OTHER; note = uracil
  modified_base 277..278: mod_base = OTHER; note = uracil
  modified_base 288..289: mod_base = OTHER; note = uracil
  modified_base 291: mod_base = OTHER; note = uracil
  modified_base 294: mod_base = OTHER; note = uracil
  modified_base 296: mod_base = OTHER; note = uracil
  modified_base 298..299: mod_base = OTHER; note = uracil
  modified_base 57: mod_base = m5c
  modified_base 67: mod_base = m5c
  modified_base 70: mod_base = m5c
  modified_base 121: mod_base = m5c
  modified_base 138: mod_base = m5c
  modified_base 158: mod_base = m5c
  modified_base 186: mod_base = m5c
  modified_base 190: mod_base = m5c
  modified_base 200: mod_base = m5c
  variation 150: note = CpG site, residue is C if methylated or T(=U) if unmethylated
ttgttaaaattggaagtaattaagatgttttttaaaaggtgaatggaggttaggtgcggtggtttacgtcgataattttagtattttgggaggttgaggtaggtggattatttgagattacgagtttgagattagttcggttaatatggygaaatttcgtttttattaaaaatattaagattaatcgggcgtggtggtacgtgtttgttattttagttatttgggaagttgaggtaggtaaattgtttgaatttgggaggtggaggttatagtgagttaagattgtgttattgtatttta

SEQ ID NO: 16 - DNA, 300 bp, synthetic construct
  source 1..300: mol_type = other DNA
  modified_base 8: mod_base = OTHER; note = uracil
  modified_base 14: mod_base = OTHER; note = uracil
  modified_base 16: mod_base = OTHER; note = uracil
  modified_base 20: mod_base = OTHER; note = uracil
  modified_base 25: mod_base = OTHER; note = uracil
  modified_base 27: mod_base = OTHER; note = uracil
  modified_base 29: mod_base = OTHER; note = uracil
  modified_base 35..36: mod_base = OTHER; note = uracil
  modified_base 38..39: mod_base = OTHER; note = uracil
  modified_base 41..42: mod_base = OTHER; note = uracil
  modified_base 44..46: mod_base = OTHER; note = uracil
  modified_base 52: mod_base = OTHER; note = uracil
  modified_base 56: mod_base = OTHER; note = uracil
  modified_base 63..64: mod_base = OTHER; note = uracil
  modified_base 67..68: mod_base = OTHER; note = uracil
  modified_base 70: mod_base = OTHER; note = uracil
  modified_base 73: mod_base = OTHER; note = uracil
  modified_base 76..78: mod_base = OTHER; note = uracil
  modified_base 85: mod_base = OTHER; note = uracil
  modified_base 94: mod_base = OTHER; note = uracil
  modified_base 98: mod_base = OTHER; note = uracil
  modified_base 104..105: mod_base = OTHER; note = uracil
  modified_base 107..108: mod_base = OTHER; note = uracil
  modified_base 112..113: mod_base = OTHER; note = uracil
  modified_base 122: mod_base = OTHER; note = uracil
  modified_base 152..153: mod_base = OTHER; note = uracil
  modified_base 161: mod_base = OTHER; note = uracil
  modified_base 166: mod_base = OTHER; note = uracil
  modified_base 171: mod_base = OTHER; note = uracil
  modified_base 173: mod_base = OTHER; note = uracil
  modified_base 177: mod_base = OTHER; note = uracil
  modified_base 185: mod_base = OTHER; note = uracil
  modified_base 187: mod_base = OTHER; note = uracil
  modified_base 195..196: mod_base = OTHER; note = uracil
  modified_base 198..199: mod_base = OTHER; note = uracil
  modified_base 202..203: mod_base = OTHER; note = uracil
  modified_base 205: mod_base = OTHER; note = uracil
  modified_base 208..209: mod_base = OTHER; note = uracil
  modified_base 211..213: mod_base = OTHER; note = uracil
  modified_base 220: mod_base = OTHER; note = uracil
  modified_base 239..240: mod_base = OTHER; note = uracil
  modified_base 242: mod_base = OTHER; note = uracil
  modified_base 245: mod_base = OTHER; note = uracil
  modified_base 247..248: mod_base = OTHER; note = uracil
  modified_base 252..253: mod_base = OTHER; note = uracil
  modified_base 255..256: mod_base = OTHER; note = uracil
  modified_base 260: mod_base = OTHER; note = uracil
  modified_base 262..263: mod_base = OTHER; note = uracil
  modified_base 274: mod_base = OTHER; note = uracil
  modified_base 277: mod_base = OTHER; note = uracil
  modified_base 285: mod_base = OTHER; note = uracil
  modified_base 288..289: mod_base = OTHER; note = uracil
  modified_base 298: mod_base = OTHER; note = uracil
  modified_base 100: mod_base = m5c
  modified_base 110: mod_base = m5c
  modified_base 114: mod_base = m5c
  modified_base 142: mod_base = m5c
  modified_base 162: mod_base = m5c
  modified_base 179: mod_base = m5c
  modified_base 230: mod_base = m5c
  modified_base 233: mod_base = m5c
  modified_base 243: mod_base = m5c
  variation 150: note = CpG site, residue is C if methylated or T(=U) if unmethylated
tggagtgtagtggtataattttggtttattgtgatttttattttttaggtttaagtaatttgtttgttttagttttttaagtagttgggataataggtacgtgttattacgttcggttaattttagtatttttagtagagacggggtttygttatgttggtcgggttggttttaaattcgtgattttaagtgatttatttgttttagttttttaaagtgttgggattatcggcgtgagttatcgtatttggtttttatttattttttgaggggtattttggttgtttttagttttggtaa

SEQ ID NO: 17 - DNA, 300 bp, synthetic construct
  source 1..300: mol_type = other DNA
  modified_base 9: mod_base = OTHER; note = uracil
  modified_base 14: mod_base = OTHER; note = uracil
  modified_base 20: mod_base = OTHER; note = uracil
  modified_base 26: mod_base = OTHER; note = uracil
  modified_base 37: mod_base = OTHER; note = uracil
  modified_base 40: mod_base = OTHER; note = uracil
  modified_base 43..44: mod_base = OTHER; note = uracil
  modified_base 46: mod_base = OTHER; note = uracil
  modified_base 54..55: mod_base = OTHER; note = uracil
  modified_base 58: mod_base = OTHER; note = uracil
  modified_base 61: mod_base = OTHER; note = uracil
  modified_base 65: mod_base = OTHER; note = uracil
  modified_base 68: mod_base = OTHER; note = uracil
  modified_base 72..73: mod_base = OTHER; note = uracil
  modified_base 75..77: mod_base = OTHER; note = uracil
  modified_base 81: mod_base = OTHER; note = uracil
  modified_base 95..97: mod_base = OTHER; note = uracil
  modified_base 100: mod_base = OTHER; note = uracil
  modified_base 103: mod_base = OTHER; note = uracil
  modified_base 107: mod_base = OTHER; note = uracil
  modified_base 109: mod_base = OTHER; note = uracil
  modified_base 116: mod_base = OTHER; note = uracil
  modified_base 122: mod_base = OTHER; note = uracil
  modified_base 128: mod_base = OTHER; note = uracil
  modified_base 130..131: mod_base = OTHER; note = uracil
  modified_base 137: mod_base = OTHER; note = uracil
  modified_base 139..140: mod_base = OTHER; note = uracil
  modified_base 151: mod_base = OTHER; note = uracil
  modified_base 155..156: mod_base = OTHER; note = uracil
  modified_base 158: mod_base = OTHER; note = uracil
  modified_base 162..163: mod_base = OTHER; note = uracil
  modified_base 168: mod_base = OTHER; note = uracil
  modified_base 174..175: mod_base = OTHER; note = uracil
  modified_base 179..181: mod_base = OTHER; note = uracil
  modified_base 184: mod_base = OTHER; note = uracil
  modified_base 187: mod_base = OTHER; note = uracil
  modified_base 189: mod_base = OTHER; note = uracil
  modified_base 195..196: mod_base = OTHER; note = uracil
  modified_base 203: mod_base = OTHER; note = uracil
  modified_base 205: mod_base = OTHER; note = uracil
  modified_base 208: mod_base = OTHER; note = uracil
  modified_base 214: mod_base = OTHER; note = uracil
  modified_base 220..221: mod_base = OTHER; note = uracil
  modified_base 223..225: mod_base = OTHER; note = uracil
  modified_base 230..231: mod_base = OTHER; note = uracil
  modified_base 242..244: mod_base = OTHER; note = uracil
  modified_base 252..253: mod_base = OTHER; note = uracil
  modified_base 255..257: mod_base = OTHER; note = uracil
  modified_base 259..262: mod_base = OTHER; note = uracil
  modified_base 265..266: mod_base = OTHER; note = uracil
  modified_base 268..271: mod_base = OTHER; note = uracil
  modified_base 274: mod_base = OTHER; note = uracil
  modified_base 277: mod_base = OTHER; note = uracil
  modified_base 279..283: mod_base = OTHER; note = uracil
  modified_base 288..289: mod_base = OTHER; note = uracil
  modified_base 295: mod_base = OTHER; note = uracil
  modified_base 298: mod_base = OTHER; note = uracil
  modified_base 3: mod_base = m5c
  modified_base 10: mod_base = m5c
  modified_base 15: mod_base = m5c
  modified_base 22: mod_base = m5c
  modified_base 32: mod_base = m5c
  modified_base 38: mod_base = m5c
  modified_base 48: mod_base = m5c
  modified_base 52: mod_base = m5c
  modified_base 59: mod_base = m5c
  modified_base 78: mod_base = m5c
  modified_base 84: mod_base = m5c
  modified_base 86: mod_base = m5c
  modified_base 90: mod_base = m5c
  modified_base 92: mod_base = m5c
  modified_base 110: mod_base = m5c
  modified_base 118: mod_base = m5c
  modified_base 123: mod_base = m5c
  modified_base 143: mod_base = m5c
  modified_base 147: mod_base = m5c
  modified_base 152: mod_base = m5c
  modified_base 166: mod_base = m5c
  modified_base 177: mod_base = m5c
  modified_base 190: mod_base = m5c
  modified_base 226: mod_base = m5c
  modified_base 232: mod_base = m5c
  modified_base 240: mod_base = m5c
  modified_base 249: mod_base = m5c
  modified_base 292: mod_base = m5c
  variation 149: note = CpG site, residue is C if methylated or T(=U) if unmethylated
ggcgggattcgagtcgagatacgtgttggagcggagtcgtttttttacggtcgttagtcgtagataattgattttttcggtatcgcgttcgcggttttgttgttggtttcggtgtttcgggtcggaatttttgtggttttagcgttcgygtcggttattggttagcgtttgggtttcgttttgtagtttcggggttatagggtatagttttagttttgattttttcgttttcgaaaggacgtttaaggcgattttttattttattttttttaattttttttttatgttttgcggtaattt

SEQ ID NO: 18 - DNA, 300 bp, synthetic construct
  source 1..300: mol_type = other DNA
  modified_base 6: mod_base = OTHER; note = uracil
  modified_base 9: mod_base = OTHER; note = uracil
  modified_base 14: mod_base = OTHER; note = uracil
  modified_base 52..53: mod_base = OTHER; note = uracil
  modified_base 62..63: mod_base = OTHER; note = uracil
  modified_base 82: mod_base = OTHER; note = uracil
  modified_base 87: mod_base = OTHER; note = uracil
  modified_base 93: mod_base = OTHER; note = uracil
  modified_base 98..100: mod_base = OTHER; note = uracil
  modified_base 106..108: mod_base = OTHER; note = uracil
  modified_base 114: mod_base = OTHER; note = uracil
  modified_base 117: mod_base = OTHER; note = uracil
  modified_base 127..129: mod_base = OTHER; note = uracil
  modified_base 135: mod_base = OTHER; note = uracil
  modified_base 139..140: mod_base = OTHER; note = uracil
  modified_base 146: mod_base = OTHER; note = uracil
  modified_base 158: mod_base = OTHER; note = uracil
  modified_base 164..165: mod_base = OTHER; note = uracil
  modified_base 167: mod_base = OTHER; note = uracil
  modified_base 175: mod_base = OTHER; note = uracil
  modified_base 179..180: mod_base = OTHER; note = uracil
  modified_base 186: mod_base = OTHER; note = uracil
  modified_base 188: mod_base = OTHER; note = uracil
  modified_base 194..195: mod_base = OTHER; note = uracil
  modified_base 198: mod_base = OTHER; note = uracil
  modified_base 201: mod_base = OTHER; note = uracil
  modified_base 206: mod_base = OTHER; note = uracil
  modified_base 220: mod_base = OTHER; note = uracil
  modified_base 230: mod_base = OTHER; note = uracil
  modified_base 237: mod_base = OTHER; note = uracil
  modified_base 243: mod_base = OTHER; note = uracil
  modified_base 250: mod_base = OTHER; note = uracil
  modified_base 264: mod_base = OTHER; note = uracil
  modified_base 266: mod_base = OTHER; note = uracil
  modified_base 269: mod_base = OTHER; note = uracil
  modified_base 271..272: mod_base = OTHER; note = uracil
  modified_base 275: mod_base = OTHER; note = uracil
  modified_base 282: mod_base = OTHER; note = uracil
  modified_base 287: mod_base = OTHER; note = uracil
  modified_base 294..295: mod_base = OTHER; note = uracil
  modified_base 298..300: mod_base = OTHER; note = uracil
  modified_base 7: mod_base = m5c
  modified_base 50: mod_base = m5c
  modified_base 59: mod_base = m5c
  modified_base 67: mod_base = m5c
  modified_base 73: mod_base = m5c
  modified_base 109: mod_base = m5c
  modified_base 122: mod_base = m5c
  modified_base 133: mod_base = m5c
  modified_base 147: mod_base = m5c
  modified_base 152: mod_base = m5c
  modified_base 156: mod_base = m5c
  modified_base 176: mod_base = m5c
  modified_base 181: mod_base = m5c
  modified_base 189: mod_base = m5c
  modified_base 207: mod_base = m5c
  modified_base 209: mod_base = m5c
  modified_base 213: mod_base = m5c
  modified_base 215: mod_base = m5c
  modified_base 221: mod_base = m5c
  modified_base 240: mod_base = m5c
  modified_base 247: mod_base = m5c
  modified_base 251: mod_base = m5c
  modified_base 261: mod_base = m5c
  modified_base 267: mod_base = m5c
  modified_base 277: mod_base = m5c
  modified_base 284: mod_base = m5c
  modified_base 289: mod_base = m5c
  modified_base 296: mod_base = m5c
  variation 150: note = CpG site, residue is C if methylated or T(=U) if unmethylated
agttgtcgtaggatatgggggagaagttggggaggatggggtgggaggtcgttttgggcgttttttcgggaacggggaggttaaagttaaagttgtgttttatggtttcggagttgtagggcgaggtttaagcgttggttagtggtcggygcgaacgttggagttataggagtttcggttcgagatatcggagttagtagtagggtcgcgaacgcgatgtcggggaggttagttgtttgcggttggcgatcgtgaggaagcggtttcgttttagtacgtgtttcggttcggatttcgttt

SEQ ID NO: 19 - DNA, 300 bp, synthetic construct
  source 1..300: mol_type = other DNA
  modified_base 1..2: mod_base = OTHER; note = uracil
  modified_base 5: mod_base = OTHER; note = uracil
  modified_base 14: mod_base = OTHER; note = uracil
  modified_base 17..18: mod_base = OTHER; note = uracil
  modified_base 21: mod_base = OTHER; note = uracil
  modified_base 27: mod_base = OTHER; note = uracil
  modified_base 31: mod_base = OTHER; note = uracil
  modified_base 35: mod_base = OTHER; note = uracil
  modified_base 37: mod_base = OTHER; note = uracil
  modified_base 40..41: mod_base = OTHER; note = uracil
  modified_base 44..45: mod_base = OTHER; note = uracil
  modified_base 54: mod_base = OTHER; note = uracil
  modified_base 63..64: mod_base = OTHER; note = uracil
  modified_base 69..70: mod_base = OTHER; note = uracil
  modified_base 79: mod_base = OTHER; note = uracil
  modified_base 86: mod_base = OTHER; note = uracil
  modified_base 94: mod_base = OTHER; note = uracil
  modified_base 111: mod_base = OTHER; note = uracil
  modified_base 116: mod_base = OTHER; note = uracil
  modified_base 118..120: mod_base = OTHER; note = uracil
  modified_base 123: mod_base = OTHER; note = uracil
  modified_base 125: mod_base = OTHER; note = uracil
  modified_base 131: mod_base = OTHER; note = uracil
  modified_base 133..135: mod_base = OTHER; note = uracil
  modified_base 142..143: mod_base = OTHER; note = uracil
  modified_base 148..149: mod_base = OTHER; note = uracil
  modified_base 155..156: mod_base = OTHER; note = uracil
  modified_base 164: mod_base = OTHER; note = uracil
  modified_base 186: mod_base = OTHER; note = uracil
  modified_base 205: mod_base = OTHER; note = uracil
  modified_base 210: mod_base = OTHER; note = uracil
  modified_base 212: mod_base = OTHER; note = uracil
  modified_base 217..220: mod_base = OTHER; note = uracil
  modified_base 247..248: mod_base = OTHER; note = uracil
  modified_base 256: mod_base = OTHER; note = uracil
  modified_base 260: mod_base = OTHER; note = uracil
  modified_base 271..272: mod_base = OTHER; note = uracil
  modified_base 276: mod_base = OTHER; note = uracil
  modified_base 280..281: mod_base = OTHER; note = uracil
  modified_base 283: mod_base = OTHER; note = uracil
  modified_base 289: mod_base = OTHER; note = uracil
  modified_base 295: mod_base = OTHER; note = uracil
  modified_base 298: mod_base = OTHER; note = uracil
  modified_base 33: mod_base = m5c
  modified_base 55: mod_base = m5c
  modified_base 150: mod_base = m5c
  modified_base 192: mod_base = m5c
  modified_base 243: mod_base = m5c
  variation 121: note = CpG site, residue is C if methylated or T(=U) if unmethylated
  variation 138: note = CpG site, residue is C if methylated or T(=U) if unmethylated
  variation 182: note = CpG site, residue is C if methylated or T(=U) if unmethylated
ttagtagggaaggtagttaatagatgtagattcgttttgtttatttgtggaggtcggtgaggttagggtttgttgggatttgaaatagtgaggtaagtgggtgtgtggtgttgggtttttygtttaagtttttttagygtgttagttttcggagttttatgtgtagggtgttggggaagggygggttgaatcgtgggtgggagttttggtttaaagttttaggtgagtggaggaattgggggcggatttgaagtattgttttgaagtggatttggtaggttttttgggtttgtgtagttg

SEQ ID NO: 20 - DNA, 300 bp, synthetic construct
  source 1..300: mol_type = other DNA
  modified_base 1: mod_base = OTHER; note = uracil
  modified_base 4: mod_base = OTHER; note = uracil
  modified_base 7: mod_base = OTHER; note = uracil
  modified_base 9: mod_base = OTHER; note = uracil
  modified_base 13..15: mod_base = OTHER; note = uracil
  modified_base 22..23: mod_base = OTHER; note = uracil
  modified_base 26..27: mod_base = OTHER; note = uracil
  modified_base 32..33: mod_base = OTHER; note = uracil
  modified_base 35: mod_base = OTHER; note = uracil
  modified_base 38: mod_base = OTHER; note = uracil
  modified_base 43: mod_base = OTHER; note = uracil
  modified_base 48: mod_base = OTHER; note = uracil
  modified_base 51: mod_base = OTHER; note = uracil
  modified_base 56: mod_base = OTHER; note = uracil
  modified_base 59..63: mod_base = OTHER; note = uracil
  modified_base 68..69: mod_base = OTHER; note = uracil
  modified_base 71..72: mod_base = OTHER; note = uracil
  modified_base 74: mod_base = OTHER; note = uracil
  modified_base 76: mod_base = OTHER; note = uracil
  modified_base 78..79: mod_base = OTHER; note = uracil
  modified_base 85: mod_base = OTHER; note = uracil
  modified_base 92..93: mod_base = OTHER; note = uracil
  modified_base 98: mod_base = OTHER; note = uracil
  modified_base 100..102: mod_base = OTHER; note = uracil
  modified_base 104..106: mod_base = OTHER; note = uracil
  modified_base 113: mod_base = OTHER; note = uracil
  modified_base 116..117: mod_base = OTHER; note = uracil
  modified_base 120..122: mod_base = OTHER; note = uracil
  modified_base 125..128: mod_base = OTHER; note = uracil
  modified_base 131: mod_base = OTHER; note = uracil
  modified_base 133..135: mod_base = OTHER; note = uracil
  modified_base 138: mod_base = OTHER; note = uracil
  modified_base 140: mod_base = OTHER; note = uracil
  modified_base 147: mod_base = OTHER; note = uracil
  modified_base 149: mod_base = OTHER; note = uracil
  modified_base 156: mod_base = OTHER; note = uracil
  modified_base 160: mod_base = OTHER; note = uracil
  modified_base 164: mod_base = OTHER; note = uracil
  modified_base 173: mod_base = OTHER; note = uracil
  modified_base 186..188: mod_base = OTHER; note = uracil
  modified_base 191: mod_base = OTHER; note = uracil
  modified_base 193..194: mod_base = OTHER; note = uracil
  modified_base 196: mod_base = OTHER; note = uracil
  modified_base 198: mod_base = OTHER; note = uracil
  modified_base 200..202: mod_base = OTHER; note = uracil
  modified_base 204: mod_base = OTHER; note = uracil
  modified_base 208..209: mod_base = OTHER; note = uracil
  modified_base 211: mod_base = OTHER; note = uracil
  modified_base 213: mod_base = OTHER; note = uracil
  modified_base 219: mod_base = OTHER; note = uracil
  modified_base 224..226: mod_base = OTHER; note = uracil
  modified_base 229: mod_base = OTHER; note = uracil
  modified_base 233..235: mod_base = OTHER; note = uracil
  modified_base 239..240: mod_base = OTHER; note = uracil
  modified_base 242: mod_base = OTHER; note = uracil
  modified_base 244: mod_base = OTHER; note = uracil
  modified_base 248..249: mod_base = OTHER; note = uracil
  modified_base 251..252: mod_base = OTHER; note = uracil
  modified_base 254: mod_base = OTHER; note = uracil
  modified_base 262: mod_base = OTHER; note = uracil
  modified_base 272: mod_base = OTHER; note = uracil
  modified_base 275: mod_base = OTHER; note = uracil
  modified_base 278: mod_base = OTHER; note = uracil
  modified_base 285: mod_base = OTHER; note = uracil
  modified_base 288..289: mod_base = OTHER; note = uracil
  modified_base 292..294: mod_base = OTHER; note = uracil
  modified_base 297: mod_base = OTHER; note = uracil
  modified_base 57: mod_base = m5c
  modified_base 108: mod_base = m5c
  modified_base 150: mod_base = m5c
  modified_base 245: mod_base = m5c
  modified_base 267: mod_base = m5c
  variation 118: note = CpG site, residue is C if methylated or T(=U) if unmethylated
  variation 162: note = CpG site, residue is C if methylated or T(=U) if unmethylated
  variation 179: note = CpG site, residue is C if methylated or T(=U) if unmethylated
tagttgtataagtttaagaggtttgttaggtttattttaagatagtattttaggttcgtttttaatttttttatttatttggggttttgagttaagatttttatttacgatttagttygtttttttttaatattttgtatataaggtttcgggaattggtaygttgggagaatttgagyggggagtttagtattatatatttatttgttttattgttttaagttttaataggttttggttttatcggtttttataggtaggtagagcgagtttgtatttgttggttgttttttttgttgg

SEQ ID NO: 21 - DNA, 300 bp, synthetic construct
  source 1..300: mol_type = other DNA
  modified_base 1..2: mod_base = OTHER; note = uracil
  modified_base 6: mod_base = OTHER; note = uracil
  modified_base 10..12: mod_base = OTHER; note = uracil
  modified_base 14..17: mod_base = OTHER; note = uracil
  modified_base 19..20: mod_base = OTHER; note = uracil
  modified_base 25..26: mod_base = OTHER; note = uracil
  modified_base 32: mod_base = OTHER; note = uracil
  modified_base 36: mod_base = OTHER; note = uracil
  modified_base 38..41: mod_base = OTHER; note = uracil
  modified_base 44: mod_base = OTHER; note = uracil
  modified_base 47: mod_base = OTHER; note = uracil
  modified_base 49: mod_base = OTHER; note = uracil
  modified_base 51: mod_base = OTHER; note = uracil
  modified_base 53..54: mod_base = OTHER; note = uracil
  modified_base 58..59: mod_base = OTHER; note = uracil
  modified_base 68..70: mod_base = OTHER; note = uracil
  modified_base 72..76: mod_base = OTHER; note = uracil
  modified_base 80..82: mod_base = OTHER; note = uracil
  modified_base 84..86: mod_base = OTHER; note = uracil
  modified_base 89..91: mod_base = OTHER; note = uracil
  modified_base 94: mod_base = OTHER; note = uracil
  modified_base 99: mod_base = OTHER; note = uracil
  modified_base 102: mod_base = OTHER; note = uracil
  modified_base 105..106: mod_base = OTHER; note = uracil
  modified_base 108..109: mod_base = OTHER; note = uracil
  modified_base 111..113: mod_base = OTHER; note = uracil
  modified_base 116: mod_base = OTHER; note = uracil
  modified_base 118..119: mod_base = OTHER; note = uracil
  modified_base 124: mod_base = OTHER; note = uracil
  modified_base 130..131: mod_base = OTHER; note = uracil
  modified_base 134: mod_base = OTHER; note = uracil
  modified_base 137..140: mod_base = OTHER; note = uracil
  modified_base 142: mod_base = OTHER; note = uracil
  modified_base 144..145: mod_base = OTHER; note = uracil
  modified_base 147: mod_base = OTHER; note = uracil
  modified_base 149: mod_base = OTHER; note = uracil
  modified_base 152..154: mod_base = OTHER; note = uracil
  modified_base 158: mod_base = OTHER; note = uracil
  modified_base 164: mod_base = OTHER; note = uracil
  modified_base 166..167: mod_base = OTHER; note = uracil
  modified_base 169..170: mod_base = OTHER; note = uracil
  modified_base 173..174: mod_base = OTHER; note = uracil
  modified_base 176..177: mod_base = OTHER; note = uracil
  modified_base 179..182: mod_base = OTHER; note = uracil
  modified_base 186..188: mod_base = OTHER; note = uracil
  modified_base 190: mod_base = OTHER; note = uracil
  modified_base 192: mod_base = OTHER; note = uracil
  modified_base 197: mod_base = OTHER; note = uracil
  modified_base 199: mod_base = OTHER; note = uracil
  modified_base 202: mod_base = OTHER; note = uracil
  modified_base 208: mod_base = OTHER; note = uracil
  modified_base 210: mod_base = OTHER; note = uracil
  modified_base 213..214: mod_base = OTHER; note = uracil
  modified_base 216: mod_base = OTHER; note = uracil
  modified_base 222..223: mod_base = OTHER; note = uracil
  modified_base 228: mod_base = OTHER; note = uracil
  modified_base 230: mod_base = OTHER; note = uracil
  modified_base 235: mod_base = OTHER; note = uracil
  modified_base 240: mod_base = OTHER; note = uracil
  modified_base 254..255: mod_base = OTHER; note = uracil
  modified_base 257: mod_base = OTHER; note = uracil
  modified_base 259: mod_base = OTHER; note = uracil
  modified_base 261: mod_base = OTHER; note = uracil
  modified_base 263: mod_base = OTHER; note = uracil
  modified_base 273..274: mod_base = OTHER; note = uracil
  modified_base 278: mod_base = OTHER; note = uracil
  modified_base 280..281: mod_base = OTHER; note = uracil
  modified_base 286..287: mod_base = OTHER; note = uracil
  modified_base 298..300: mod_base = OTHER; note = uracil
  modified_base 8: mod_base = m5c
  modified_base 21: mod_base = m5c
  modified_base 28: mod_base = m5c
  modified_base 87: mod_base = m5c
  modified_base 92: mod_base = m5c
  modified_base 95: mod_base = m5c
  modified_base 97: mod_base = m5c
  modified_base 120: mod_base = m5c
  modified_base 232: mod_base = m5c
  modified_base 237: mod_base = m5c
  modified_base 251: mod_base = m5c
  variation 150: note = CpG site, residue is C if methylated or T(=U) if unmethylated
ttagattcgttttttttattcgggtttcggatttttattttagttttttttttttggttagtgattatttatttttaattttatttcgtttcgtcgcgtaattattttttttttttattcggattgggattattatttttattttatttygtttagtttgggattttatttgttttttttttaattttatattaatttttgtttggtttttttttttttggtttaatttttcgtttcggtttattggggacggttatttttatagtttggttttaaatattagtttttggatggattttt

SEQ ID NO: 22 - DNA, 300 bp, synthetic construct
  source 1..300: mol_type = other DNA
  modified_base 7..8: mod_base = OTHER; note = uracil
  modified_base 11..12: mod_base = OTHER; note = uracil
  modified_base 18: mod_base = OTHER; note = uracil
  modified_base 31..32: mod_base = OTHER; note = uracil
  modified_base 36: mod_base = OTHER; note = uracil
  modified_base 48: mod_base = OTHER; note = uracil
  modified_base 52..55: mod_base = OTHER; note = uracil
  modified_base 62: mod_base = OTHER; note = uracil
  modified_base 80..81: mod_base = OTHER; note = uracil
  modified_base 95..96: mod_base = OTHER; note = uracil
  modified_base 100: mod_base = OTHER; note = uracil
  modified_base 129: mod_base = OTHER; note = uracil
  modified_base 139..141: mod_base = OTHER; note = uracil
  modified_base 145: mod_base = OTHER; note = uracil
  modified_base 173..175: mod_base = OTHER; note = uracil
  modified_base 179: mod_base = OTHER; note = uracil
  modified_base 238: mod_base = OTHER; note = uracil
  modified_base 240: mod_base = OTHER; note = uracil
  modified_base 244..245: mod_base = OTHER; note = uracil
  modified_base 258: mod_base = OTHER; note = uracil
  modified_base 271: mod_base = OTHER; note = uracil
  modified_base 277..278: mod_base = OTHER; note = uracil
  modified_base 297: mod_base = OTHER; note = uracil
  modified_base 49: mod_base = m5c
  modified_base 63: mod_base = m5c
  modified_base 68: mod_base = m5c
  modified_base 180: mod_base = m5c
  modified_base 203: mod_base = m5c
  modified_base 205: mod_base = m5c
  modified_base 208: mod_base = m5c
  modified_base 213: mod_base = m5c
  modified_base 272: mod_base = m5c
  modified_base 279: mod_base = m5c
  modified_base 292: mod_base = m5c
  variation 150: note = CpG site, residue is C if methylated or T(=U) if unmethylated
gggaatttatttaggaattggtgtttggaattaaattgtgagagtggtcgtttttaataagtcgagacgagagattaggttaaagaggaagagattaagtagagattagtgtgggattggggaggaggtaggtggagttttagattgggyggagtggagtggggatgatggttttagttcgggtgaagggaggaggtagttgcgcggcggggcggggtgggattgggggtgggtaattattggttaggagagagaagttggggtgaaagttcgaggttcgggtggggagggcgagtttgg

SEQ ID NO: 23 - DNA, 300 bp, synthetic construct
  source 1..300: mol_type = other DNA
  modified_base 3: mod_base = OTHER; note = uracil
  modified_base 7..8: mod_base = OTHER; note = uracil
  modified_base 13..15: mod_base = OTHER; note = uracil
  modified_base 18: mod_base = OTHER; note = uracil
  modified_base 20..21: mod_base = OTHER; note = uracil
  modified_base 24..26: mod_base = OTHER; note = uracil
  modified_base 29..30: mod_base = OTHER; note = uracil
  modified_base 33: mod_base = OTHER; note = uracil
  modified_base 38..39: mod_base = OTHER; note = uracil
  modified_base 41..42: mod_base = OTHER; note = uracil
  modified_base 50..51: mod_base = OTHER; note = uracil
  modified_base 54: mod_base = OTHER; note = uracil
  modified_base 64: mod_base = OTHER; note = uracil
  modified_base 70: mod_base = OTHER; note = uracil
  modified_base 74..75: mod_base = OTHER; note = uracil
  modified_base 85: mod_base = OTHER; note = uracil
  modified_base 88: mod_base = OTHER; note = uracil
  modified_base 99: mod_base = OTHER; note = uracil
  modified_base 105: mod_base = OTHER; note = uracil
  modified_base 109: mod_base = OTHER; note = uracil
  modified_base 111: mod_base = OTHER; note = uracil
  modified_base 125: mod_base = OTHER; note = uracil
  modified_base 130: mod_base = OTHER; note = uracil
  modified_base 134: mod_base = OTHER; note = uracil
  modified_base 139..141: mod_base = OTHER; note = uracil
  modified_base 146..147: mod_base = OTHER; note = uracil
  modified_base 150: mod_base = OTHER; note = uracil
  modified_base 153..154: mod_base = OTHER; note = uracil
  modified_base 170: mod_base = OTHER; note = uracil
  modified_base 173..175: mod_base = OTHER; note = uracil
  modified_base 178..179: mod_base = OTHER; note = uracil
  modified_base 183: mod_base = OTHER; note = uracil
  modified_base 195..196: mod_base = OTHER; note = uracil
  modified_base 226..227: mod_base = OTHER; note = uracil
  modified_base 233: mod_base = OTHER; note = uracil
  modified_base 244: mod_base = OTHER; note = uracil
  modified_base 253: mod_base = OTHER; note = uracil
  modified_base 259: mod_base = OTHER; note = uracil
  modified_base 268: mod_base = OTHER; note = uracil
  modified_base 274: mod_base = OTHER; note = uracil
  modified_base 297: mod_base = OTHER; note = uracil
  modified_base 1: mod_base = m5c
  modified_base 9: mod_base = m5c
  modified_base 11: mod_base = m5c
  modified_base 16: mod_base = m5c
  modified_base 22: mod_base = m5c
  modified_base 27: mod_base = m5c
  modified_base 34: mod_base = m5c
  modified_base 36: mod_base = m5c
  modified_base 43: mod_base = m5c
  modified_base 48: mod_base = m5c
  modified_base 52: mod_base = m5c
  modified_base 62: mod_base = m5c
  modified_base 106: mod_base = m5c
  modified_base 118: mod_base = m5c
  modified_base 128: mod_base = m5c
  modified_base 132: mod_base = m5c
  modified_base 137: mod_base = m5c
  modified_base 142: mod_base = m5c
  modified_base 161: mod_base = m5c
  modified_base 166: mod_base = m5c
  modified_base 176: mod_base = m5c
  modified_base 180: mod_base = m5c
  modified_base 198: mod_base = m5c
  modified_base 213: mod_base = m5c
  modified_base 221: mod_base = m5c
  modified_base 228: mod_base = m5c
  modified_base 234: mod_base = m5c
  modified_base 245: mod_base = m5c
  modified_base 276: mod_base = m5c
  modified_base 287: mod_base = m5c
  modified_base 298: mod_base = m5c
  variation 151: note = CpG site, residue is C if methylated or T(=U) if unmethylated
cgtaggttcgcgtttcgttttcgtttcgtttgtcgcgtttttcggggcgttcgtattaaagcgtatatgtaagttatgaattattaattgaaaggagttaattatcggttttaaaaacgagtgtttgcgttcgtagcgtttcgggttattygtttatttacggagcgatttatttcgttcggttggggagggggtttcgggagggagagagacggagaaacggagttcgagatcgggagagagtcggagaggtagggattggagagtttgggatacgaaggagaggcggggagagatcga

SEQ ID NO: 24 - DNA, 300 bp, synthetic construct
  source 1..300: mol_type = other DNA
  modified_base 6: mod_base = OTHER; note = uracil
  modified_base 8: mod_base = OTHER; note = uracil
  modified_base 10..12: mod_base = OTHER; note = uracil
  modified_base 15..16: mod_base = OTHER; note = uracil
  modified_base 18: mod_base = OTHER; note = uracil
  modified_base 20..21: mod_base = OTHER; note = uracil
  modified_base 29..31: mod_base = OTHER; note = uracil
  modified_base 35: mod_base = OTHER; note = uracil
  modified_base 37: mod_base = OTHER; note = uracil
  modified_base 39..40: mod_base = OTHER; note = uracil
  modified_base 44..46: mod_base = OTHER; note = uracil
  modified_base 49..50: mod_base = OTHER; note = uracil
  modified_base 52: mod_base = OTHER; note = uracil
  modified_base 54: mod_base = OTHER; note = uracil
  modified_base 58: mod_base = OTHER; note = uracil
  modified_base 60: mod_base = OTHER; note = uracil
  modified_base 62: mod_base = OTHER; note = uracil
  modified_base 64..65: mod_base = OTHER; note = uracil
  modified_base 70: mod_base = OTHER; note = uracil
  modified_base 76: mod_base = OTHER; note = uracil
  modified_base 78: mod_base = OTHER; note = uracil
  modified_base 84: mod_base = OTHER; note = uracil
  modified_base 86: mod_base = OTHER; note = uracil
  modified_base 90: mod_base = OTHER; note = uracil
  modified_base 92: mod_base = OTHER; note = uracil
  modified_base 94: mod_base = OTHER; note = uracil
  modified_base 96..98: mod_base = OTHER; note = uracil
  modified_base 100..101: mod_base = OTHER; note = uracil
  modified_base 107..111: mod_base = OTHER; note = uracil
  modified_base 113..116: mod_base = OTHER; note = uracil
  modified_base 119: mod_base = OTHER; note = uracil
  modified_base 136: mod_base = OTHER; note = uracil
  modified_base 138: mod_base = OTHER; note = uracil
  modified_base 156..157: mod_base = OTHER; note = uracil
  modified_base 165: mod_base = OTHER; note = uracil
  modified_base 174: mod_base = OTHER; note = uracil
  modified_base 178: mod_base = OTHER; note = uracil
  modified_base 180: mod_base = OTHER; note = uracil
  modified_base 193: mod_base = OTHER; note = uracil
  modified_base 204: mod_base = OTHER; note = uracil
  modified_base 206..207: mod_base = OTHER; note = uracil
  modified_base 211: mod_base = OTHER; note = uracil
  modified_base 223: mod_base = OTHER; note = uracil
  modified_base 228: mod_base = OTHER; note = uracil
  modified_base 232: mod_base = OTHER; note = uracil
  modified_base 240: mod_base = OTHER; note = uracil
  modified_base 254..256: mod_base = OTHER; note = uracil
  modified_base 269: mod_base = OTHER; note = uracil
  modified_base 295..296: mod_base = OTHER; note = uracil
  modified_base 2: mod_base = m5c
  modified_base 13: mod_base = m5c
  modified_base 24: mod_base = m5c
  modified_base 55: mod_base = m5c
  modified_base 66: mod_base = m5c
  modified_base 72: mod_base = m5c
  modified_base 79: mod_base = m5c
  modified_base 87: mod_base = m5c
  modified_base 102: mod_base = m5c
  modified_base 120: mod_base = m5c
  modified_base 124: mod_base = m5c
  modified_base 134: mod_base = m5c
  modified_base 139: mod_base = m5c
  modified_base 158: mod_base = m5c
  modified_base 163: mod_base = m5c
  modified_base 168: mod_base = m5c
  modified_base 172: mod_base = m5c
  modified_base 182: mod_base = m5c
  modified_base 194: mod_base = m5c
  modified_base 238: mod_base = m5c
  modified_base 248: mod_base = m5c
  modified_base 252: mod_base = m5c
  modified_base 257: mod_base = m5c
  modified_base 264: mod_base = m5c
  modified_base 266: mod_base = m5c
  modified_base 273: mod_base = m5c
  modified_base 278: mod_base = m5c
  modified_base 284: mod_base = m5c
  modified_base 289: mod_base = m5c
  modified_base 291: mod_base = m5c
  modified_base 299: mod_base = m5c
  variation 149: note = CpG site, residue is C if methylated or T(=U) if unmethylated
tcggttttttttcgtttttttttcgtgttttagattttttagtttttgttttttcggttttttttcggtttcgggtttcgttttttcgtttttttttttttcgaggttttttttttagtcgggcggggtagatcgtttcgtaaataggyggatggttcggggcgttgcgagcgtagatattcgtttttagagtcggtaattgattttttttagttgataatttatggtttgtatatgcgttttaatgcgggcgtttcgggaggcgcggtaggcggggcgggagcggggcgcgggtttgcg

SEQ ID NO: 25 - DNA, 300 bp, synthetic construct
  source 1..300: mol_type = other DNA
  modified_base 2: mod_base = OTHER; note = uracil
  modified_base 8: mod_base = OTHER; note = uracil
  modified_base 11: mod_base = OTHER; note = uracil
  modified_base 26: mod_base = OTHER; note = uracil
  modified_base 35..36: mod_base = OTHER; note = uracil
  modified_base 43: mod_base = OTHER; note = uracil
  modified_base 46..47: mod_base = OTHER; note = uracil
  modified_base 49..52: mod_base = OTHER; note = uracil
  modified_base 54: mod_base = OTHER; note = uracil
  modified_base 62..63: mod_base = OTHER; note = uracil
  modified_base 66: mod_base = OTHER; note = uracil
  modified_base 70..71: mod_base = OTHER; note = uracil
  modified_base 76..78: mod_base = OTHER; note = uracil
  modified_base 80: mod_base = OTHER; note = uracil
  modified_base 90: mod_base = OTHER; note = uracil
  modified_base 101: mod_base = OTHER; note = uracil
  modified_base 108..109: mod_base = OTHER; note = uracil
  modified_base 115: mod_base = OTHER; note = uracil
  modified_base 123: mod_base = OTHER; note = uracil
  modified_base 127: mod_base = OTHER; note = uracil
  modified_base 131: mod_base = OTHER; note = uracil
  modified_base 136: mod_base = OTHER; note = uracil
  modified_base 142: mod_base = OTHER; note = uracil
  modified_base 161..162: mod_base = OTHER; note = uracil
  modified_base 170: mod_base = OTHER; note = uracil
  modified_base 182: mod_base = OTHER; note = uracil
  modified_base 186: mod_base = OTHER; note = uracil
  modified_base 194..196: mod_base = OTHER; note = uracil
  modified_base 206: mod_base = OTHER; note = uracil
  modified_base 220..221: mod_base = OTHER; note = uracil
  modified_base 227: mod_base = OTHER; note = uracil
  modified_base 240: mod_base = OTHER; note = uracil
  modified_base 251: mod_base = OTHER; note = uracil
  modified_base 254: mod_base = OTHER; note = uracil
  modified_base 264: mod_base = OTHER; note = uracil
  modified_base 275: mod_base = OTHER; note = uracil
  modified_base 280: mod_base = OTHER; note = uracil
  modified_base 289: mod_base = OTHER; note = uracil
  modified_base 295: mod_base = OTHER; note = uracil
  modified_base 6: mod_base = m5c
  modified_base 20: mod_base = m5c
  modified_base 22: mod_base = m5c
  modified_base 27: mod_base = m5c
  modified_base 37: mod_base = m5c
  modified_base 58: mod_base = m5c
  modified_base 72: mod_base = m5c
  modified_base 85: mod_base = m5c
  modified_base 134: mod_base = m5c
  modified_base 171: mod_base = m5c
  modified_base 176: mod_base = m5c
  modified_base 222: mod_base = m5c
  modified_base 234: mod_base = m5c
  modified_base 273: mod_base = m5c
  modified_base 282: mod_base = m5c
  modified_base 290: mod_base = m5c
  variation 151: note = CpG site, residue is C if methylated or T(=U) if unmethylated
atagtcgttgtagggaggacgcgggtcgtgagaattcggggatagtttttttttttgcggttttgtagtttcggatttattgggcggattagaaagtttgtagggagttagggattaggagatagatagatagcgtagggatagagaaagyggagggatgttagaaagatcgagtcggggatagatagagagatttagggtgagatagaggaagagatattcggggttgaaaacggtggtagaaagtgagtaatttagggagatagaaagagcgtagaattcgaaatttcgaggtagaga

SEQ ID NO: 26 - DNA, 300 bp, synthetic construct
  source 1..300: mol_type = other DNA
  modified_base 2: mod_base = OTHER; note = uracil
  modified_base 4: mod_base = OTHER; note = uracil
  modified_base 7..8: mod_base = OTHER; note = uracil
  modified_base 24: mod_base = OTHER; note = uracil
  modified_base 29: mod_base = OTHER; note = uracil
  modified_base 31: mod_base = OTHER; note = uracil
  modified_base 35: mod_base = OTHER; note = uracil
  modified_base 39: mod_base = OTHER; note = uracil
  modified_base 41..43: mod_base = OTHER; note = uracil
  modified_base 51: mod_base = OTHER; note = uracil
  modified_base 53: mod_base = OTHER; note = uracil
  modified_base 55: mod_base = OTHER; note = uracil
  modified_base 59: mod_base = OTHER; note = uracil
  modified_base 62..63: mod_base = OTHER; note = uracil
  modified_base 65: mod_base = OTHER; note = uracil
  modified_base 72: mod_base = OTHER; note = uracil
  modified_base 75..77: mod_base = OTHER; note = uracil
  modified_base 85: mod_base = OTHER; note = uracil
  modified_base 87: mod_base = OTHER; note = uracil
  modified_base 90..91: mod_base = OTHER; note = uracil
  modified_base 93: mod_base = OTHER; note = uracil
  modified_base 97: mod_base = OTHER; note = uracil
  modified_base 99: mod_base = OTHER; note = uracil
  modified_base 101..103: mod_base = OTHER; note = uracil
  modified_base 109: mod_base = OTHER; note = uracil
  modified_base 111: mod_base = OTHER; note = uracil
  modified_base 113: mod_base = OTHER; note = uracil
  modified_base 117: mod_base = OTHER; note = uracil
  modified_base 121..123: mod_base = OTHER; note = uracil
  modified_base 127: mod_base = OTHER; note = uracil
  modified_base 133: mod_base = OTHER; note = uracil
  modified_base 137: mod_base = OTHER; note = uracil
  modified_base 141: mod_base = OTHER; note = uracil
  modified_base 144..146: mod_base = OTHER; note = uracil
  modified_base 148: mod_base = OTHER; note = uracil
  modified_base 151: mod_base = OTHER; note = uracil
  modified_base 155: mod_base = OTHER; note = uracil
  modified_base 157: mod_base = OTHER; note = uracil
  modified_base 161..163: mod_base = OTHER; note = uracil
  modified_base 168: mod_base = OTHER; note = uracil
  modified_base 172: mod_base = OTHER; note = uracil
  modified_base 176: mod_base = OTHER; note = uracil
  modified_base 180: mod_base = OTHER; note = uracil
  modified_base 182..183: mod_base = OTHER; note = uracil
  modified_base 188..190: mod_base = OTHER; note = uracil
  modified_base 194: mod_base = OTHER; note = uracil
  modified_base 196..198: mod_base = OTHER; note = uracil
  modified_base 201: mod_base = OTHER; note = uracil
  modified_base 205: mod_base = OTHER; note = uracil
  modified_base 209: mod_base = OTHER; note = uracil
  modified_base 214: mod_base = OTHER; note = uracil
  modified_base 217..219: mod_base = OTHER; note = uracil
  modified_base 227: mod_base = OTHER; note = uracil
  modified_base 233: mod_base = OTHER; note = uracil
  modified_base 236: mod_base = OTHER; note = uracil
  modified_base 241: mod_base = OTHER; note = uracil
  modified_base 244: mod_base = OTHER; note = uracil
  modified_base 256: mod_base = OTHER; note = uracil
  modified_base 260..262: mod_base = OTHER; note = uracil
  modified_base 269: mod_base = OTHER; note = uracil
  modified_base 271: mod_base = OTHER; note = uracil
  modified_base 276..277: mod_base = OTHER; note = uracil
  modified_base 283..284: mod_base = OTHER; note = uracil
  modified_base 286..288: mod_base = OTHER; note = uracil
  modified_base 291: mod_base = OTHER; note = uracil
  modified_base 297: mod_base = OTHER; note = uracil
  modified_base 10: mod_base = m5c
  modified_base 18: mod_base = m5c
  modified_base 27: mod_base = m5c
  modified_base 66: mod_base = m5c
  modified_base 78: mod_base = m5c
  modified_base 124: mod_base = m5c
  modified_base 129: mod_base = m5c
  modified_base 166: mod_base = m5c
  modified_base 215: mod_base = m5c
  modified_base 228: mod_base = m5c
  modified_base 242: mod_base = m5c
  modified_base 263: mod_base = m5c
  modified_base 273: mod_base = m5c
  modified_base 278: mod_base = m5c
  modified_base 280: mod_base = m5c
  modified_base 294: mod_base = m5c
  variation 149: note = CpG site, residue is C if methylated or T(=U) if unmethylated
tttttgtttcggaatttcgagttttgcgttttttttgtttttttaagttgtttattttttgttatcgtttttagtttcgggtatttttttttttgttttattttgggtttttttgtttgttttcgattcggtttttttggtattttttygttttttttgtttttgcgttgtttgtttgttttttagtttttggttttttgtaaattttttgattcgtttagtgggttcgggattgtaggatcgtaagaggggaggttgttttcgggtttttacggttcgcgttttttttgtagcgattgt

SEQ ID NO: 27 - DNA, 300 bp, synthetic construct
  source 1..300: mol_type = other DNA
  modified_base 2: mod_base = OTHER; note = uracil
  modified_base 5..6: mod_base = OTHER; note = uracil
  modified_base 11..13: mod_base = OTHER; note = uracil
  modified_base 19: mod_base = OTHER; note = uracil
  modified_base 23..24: mod_base = OTHER; note = uracil
  modified_base 26..27: mod_base = OTHER; note = uracil
  modified_base 31: mod_base = OTHER; note = uracil
  modified_base 34..35: mod_base = OTHER; note = uracil
  modified_base 41: mod_base = OTHER; note = uracil
  modified_base 44..45: mod_base = OTHER; note = uracil
  modified_base 49: mod_base = OTHER; note = uracil
  modified_base 55: mod_base = OTHER; note = uracil
  modified_base 59: mod_base = OTHER; note = uracil
  modified_base 63: mod_base = OTHER; note = uracil
  modified_base 67: mod_base = OTHER; note = uracil
  modified_base 73: mod_base = OTHER; note = uracil
  modified_base 80: mod_base = OTHER; note = uracil
  modified_base 82..84: mod_base = OTHER; note = uracil
  modified_base 96: mod_base = OTHER; note = uracil
  modified_base 107: mod_base = OTHER; note = uracil
  modified_base 109: mod_base = OTHER; note = uracil
  modified_base 111: mod_base = OTHER; note = uracil
  modified_base 113: mod_base = OTHER; note = uracil
  modified_base 129: mod_base = OTHER; note = uracil
  modified_base 136: mod_base = OTHER; note = uracil
  modified_base 138..139: mod_base = OTHER; note = uracil
  modified_base 143..144: mod_base = OTHER; note = uracil
  modified_base 152: mod_base = OTHER; note = uracil
  modified_base 155: mod_base = OTHER; note = uracil
  modified_base 161: mod_base = OTHER; note = uracil
  modified_base 165: mod_base = OTHER; note = uracil
  modified_base 167: mod_base = OTHER; note = uracil
  modified_base 177..178: mod_base = OTHER; note = uracil
  modified_base 187: mod_base = OTHER; note = uracil
  modified_base 192: mod_base = OTHER; note = uracil
  modified_base 194: mod_base = OTHER; note = uracil
  modified_base 200..201: mod_base = OTHER; note = uracil
  modified_base 210: mod_base = OTHER; note = uracil
  modified_base 213: mod_base = OTHER; note = uracil
  modified_base 216: mod_base = OTHER; note = uracil
  modified_base 219: mod_base = OTHER; note = uracil
  modified_base 223: mod_base = OTHER; note = uracil
  modified_base 225: mod_base = OTHER; note = uracil
  modified_base 243: mod_base = OTHER; note = uracil
  modified_base 255: mod_base = OTHER; note = uracil
  modified_base 259..262: mod_base = OTHER; note = uracil
  modified_base 283..284: mod_base = OTHER; note = uracil
  modified_base 289..290: mod_base = OTHER; note = uracil
  modified_base 295: mod_base = OTHER; note = uracil
  modified_base 14: mod_base = m5c
  modified_base 17: mod_base = m5c
  modified_base 47: mod_base = m5c
  modified_base 51: mod_base = m5c
  modified_base 94: mod_base = m5c
  modified_base 125: mod_base = m5c
  modified_base 145: mod_base = m5c
  modified_base 148: mod_base = m5c
  modified_base 153: mod_base = m5c
  modified_base 168: mod_base = m5c
  modified_base 185: mod_base = m5c
  modified_base 214: mod_base = m5c
  modified_base 231: mod_base = m5c
  modified_base 235: mod_base = m5c
  modified_base 240: mod_base = m5c
  modified_base 253: mod_base = m5c
  modified_base 272: mod_base = m5c
  variation 150: note = CpG site, residue is C if methylated or T(=U) if unmethylated
ttagtttgtatttcggcgttggtttttagatagttaggtgttgtttcgtacggttttgtttgtaggttggggtatgaagtattttggtatttacgttgggattggttttttattagggttggggcgggttgtggttatttggttcggcgygtcgtagaggttggtttcggagaagatttgggggcgtaagatttagaggttagagggtgtagtcgttgttgatttatttgcggacggggcggttgggaggagcgttagtttttgttgtgagcgatttgagagttagggttaaatttgggt

SEQ ID NO: 28 - DNA, 300 bp, synthetic construct
  source 1..300: mol_type = other DNA
  modified_base 2..4: mod_base = OTHER; note = uracil
  modified_base 13..15: mod_base = OTHER; note = uracil
  modified_base 19: mod_base = OTHER; note = uracil
  modified_base 21: mod_base = OTHER; note = uracil
  modified_base 23: mod_base = OTHER; note = uracil
  modified_base 30: mod_base = OTHER; note = uracil
  modified_base 32: mod_base = OTHER; note = uracil
  modified_base 34: mod_base = OTHER; note = uracil
  modified_base 37: mod_base = OTHER; note = uracil
  modified_base 43: mod_base = OTHER; note = uracil
  modified_base 49: mod_base = OTHER; note = uracil
  modified_base 51..52: mod_base = OTHER; note = uracil
  modified_base 54..56: mod_base = OTHER; note = uracil
  modified_base 59: mod_base = OTHER; note = uracil
  modified_base 62..64: mod_base = OTHER; note = uracil
  modified_base 68: mod_base = OTHER; note = uracil
  modified_base 71: mod_base = OTHER; note = uracil
  modified_base 80: mod_base = OTHER; note = uracil
  modified_base 83: mod_base = OTHER; note = uracil
  modified_base 89: mod_base = OTHER; note = uracil
  modified_base 92: mod_base = OTHER; note = uracil
  modified_base 94..96: mod_base = OTHER; note = uracil
  modified_base 98: mod_base = OTHER; note = uracil
  modified_base 102..103: mod_base = OTHER; note = uracil
  modified_base 105: mod_base = OTHER; note = uracil
  modified_base 111: mod_base = OTHER; note = uracil
  modified_base 117..121: mod_base = OTHER; note = uracil
  modified_base 126: mod_base = OTHER; note = uracil
  modified_base 129: mod_base = OTHER; note = uracil
  modified_base 131: mod_base = OTHER; note = uracil
  modified_base 137..138: mod_base = OTHER; note = uracil
  modified_base 141..142: mod_base = OTHER; note = uracil
  modified_base 144: mod_base = OTHER; note = uracil
  modified_base 154: mod_base = OTHER; note = uracil
  modified_base 159..160: mod_base = OTHER; note = uracil
  modified_base 167..168: mod_base = OTHER; note = uracil
  modified_base 170: mod_base = OTHER; note = uracil
  modified_base 173..174: mod_base = OTHER; note = uracil
  modified_base 177..180: mod_base = OTHER; note = uracil
  modified_base 183..185: mod_base = OTHER; note = uracil
  modified_base 196..197: mod_base = OTHER; note = uracil
  modified_base 201..203: mod_base = OTHER; note = uracil
  modified_base 214..215: mod_base = OTHER; note = uracil
  modified_base 222: mod_base = OTHER; note = uracil
  modified_base 225: mod_base = OTHER; note = uracil
  modified_base 229..232: mod_base = OTHER; note = uracil
  modified_base 235..236: mod_base = OTHER; note = uracil
  modified_base 239: mod_base = OTHER; note = uracil
  modified_base 243: mod_base = OTHER; note = uracil
  modified_base 248: mod_base = OTHER; note = uracil
  modified_base 258: mod_base = OTHER; note = uracil
  modified_base 261: mod_base = OTHER; note = uracil
  modified_base 263..264: mod_base = OTHER; note = uracil
  modified_base 268: mod_base = OTHER; note = uracil
  modified_base 272: mod_base = OTHER; note = uracil
  modified_base 279..280: mod_base = OTHER; note = uracil
  modified_base 285: mod_base = OTHER; note = uracil
  modified_base 293: mod_base = OTHER; note = uracil
  modified_base 297: mod_base = OTHER; note = uracil
  modified_base 28: mod_base = m5c
  modified_base 47: mod_base = m5c
  modified_base 60: mod_base = m5c
  modified_base 65: mod_base = m5c
  modified_base 69: mod_base = m5c
  modified_base 86: mod_base = m5c
  modified_base 115: mod_base = m5c
  modified_base 132: mod_base = m5c
  modified_base 147: mod_base = m5c
  modified_base 152: mod_base = m5c
  modified_base 155: mod_base = m5c
  modified_base 175: mod_base = m5c
  modified_base 206: mod_base = m5c
  modified_base 249: mod_base = m5c
  modified_base 253: mod_base = m5c
  modified_base 283: mod_base = m5c
  modified_base 286: mod_base = m5c
  variation 150: note = CpG site, residue is C if methylated or T(=U) if unmethylated
atttagatttggttttggtttttaaatcgtttataataggggttagcgttttttttagtcgtttcgttcgtaaatgagttagtagcggttgtattttttggtttttgagttttgcgtttttaggtttttttcggagttagtttttgcggygcgtcgggttaggtgattatagttcgttttaattttagtgagagattaattttagcgtaaatattagggtgttttatgttttagtttgtaagtaagatcgtgcgaggtagtatttggttgtttggaggttagcgtcggggtataggttga

SEQ ID NO: 29 - DNA, 301 bp, synthetic construct
  source 1..301: mol_type = other DNA
  modified_base 2..4: mod_base = OTHER; note = uracil
  modified_base 7..8: mod_base = OTHER; note = uracil
  modified_base 10: mod_base = OTHER; note = uracil
  modified_base 12: mod_base = OTHER; note = uracil
  modified_base 27: mod_base = OTHER; note = uracil
  modified_base 29..33: mod_base = OTHER; note = uracil
  modified_base 36: mod_base = OTHER; note = uracil
  modified_base 39: mod_base = OTHER; note = uracil
  modified_base 44: mod_base = OTHER; note = uracil
  modified_base 46..49: mod_base = OTHER; note = uracil
  modified_base 54: mod_base = OTHER; note = uracil
  modified_base 57: mod_base = OTHER; note = uracil
  modified_base 60..61: mod_base = OTHER; note = uracil
  modified_base 63: mod_base = OTHER; note = uracil
  modified_base 67..68: mod_base = OTHER; note = uracil
  modified_base 70: mod_base = OTHER; note = uracil
  modified_base 72: mod_base = OTHER; note = uracil
  modified_base 76: mod_base = OTHER; note = uracil
  modified_base 78..79: mod_base = OTHER; note = uracil
  modified_base 85: mod_base = OTHER; note = uracil
  modified_base 88: mod_base = OTHER; note = uracil
  modified_base 90..91: mod_base = OTHER; note = uracil
  modified_base 93: mod_base = OTHER; note = uracil
  modified_base 95: mod_base = OTHER; note = uracil
  modified_base 98..100: mod_base = OTHER; note = uracil
  modified_base 103..105: mod_base = OTHER; note = uracil
  modified_base 109..111: mod_base = OTHER; note = uracil
  modified_base 113: mod_base = OTHER; note = uracil
  modified_base 117: mod_base = OTHER; note = uracil
  modified_base 120..121: mod_base = OTHER; note = uracil
  modified_base 136: mod_base = OTHER; note = uracil
  modified_base 139..141: mod_base = OTHER; note = uracil
  modified_base 143..144: mod_base = OTHER; note = uracil
  modified_base 147: mod_base = OTHER; note = uracil
  modified_base 159: mod_base = OTHER; note = uracil
  modified_base 162..163: mod_base = OTHER; note = uracil
  modified_base 165..166: mod_base = OTHER; note = uracil
  modified_base 172: mod_base = OTHER; note = uracil
  modified_base 174..178: mod_base = OTHER; note = uracil
  modified_base 184: mod_base = OTHER; note = uracil
  modified_base 189: mod_base = OTHER; note = uracil
  modified_base 191: mod_base = OTHER; note = uracil
  modified_base 197: mod_base = OTHER; note = uracil
  modified_base 200..201: mod_base = OTHER; note = uracil
  modified_base 207: mod_base = OTHER; note = uracil
  modified_base 209..210: mod_base = OTHER; note = uracil
  modified_base 212: mod_base = OTHER; note = uracil
  modified_base 215: mod_base = OTHER; note = uracil
  modified_base 225: mod_base = OTHER; note = uracil
  modified_base 228: mod_base = OTHER; note = uracil
  modified_base 237..242: mod_base = OTHER; note = uracil
  modified_base 244..246: mod_base = OTHER; note = uracil
  modified_base 249..251: mod_base = OTHER; note = uracil
  modified_base 253: mod_base = OTHER; note = uracil
  modified_base 256..258: mod_base = OTHER; note = uracil
  modified_base 262: mod_base = OTHER; note = uracil
  modified_base 267..268: mod_base = OTHER; note = uracil
  modified_base 270..271: mod_base = OTHER; note = uracil
  modified_base 277: mod_base = OTHER; note = uracil
  modified_base 280: mod_base = OTHER; note = uracil
  modified_base 291: mod_base = OTHER; note = uracil
  modified_base 295..297: mod_base = OTHER; note = uracil
  modified_base 40: mod_base = m5c
  modified_base 86: mod_base = m5c
  modified_base 101: mod_base = m5c
  modified_base 106: mod_base = m5c
  modified_base 202: mod_base = m5c
  modified_base 213: mod_base = m5c
  modified_base 229: mod_base = m5c
  modified_base 247: mod_base = m5c
  modified_base 254: mod_base = m5c
  modified_base 259: mod_base = m5c
  modified_base 285: mod_base = m5c
  modified_base 300: mod_base = m5c
  variation 150: note = CpG site, residue is C if methylated or T(=U) if unmethylated
  variation 169: note = CpG site, residue is C if methylated or T(=U) if unmethylated
gtttagttttataaaggtgagtggggtatttttagttgtcgagtttttttagttagtagttttatattttatatttttttgtggtcgtattttatagtttcgtttcggtttataggtatttttaagaagaagtgtttgtttattattagygagaagagtagttttttgyggttttttttggagtaatgtatagggttttttcggggttttttcgttagtgagggtagtcggggaggttttttttttcgtttatcgtttcggtagagtttttaggagtagttgaacggggttatgtttatcg

SEQ ID NO: 30 - DNA, 301 bp, synthetic construct
  source 1..301: mol_type = other DNA
  modified_base 8: mod_base = OTHER; note = uracil
  modified_base 13..15: mod_base = OTHER; note = uracil
  modified_base 20: mod_base = OTHER; note = uracil
  modified_base 23: mod_base = OTHER; note = uracil
  modified_base 26: mod_base = OTHER; note = uracil
  modified_base 28..29: mod_base = OTHER; note = uracil
  modified_base 36: mod_base = OTHER; note = uracil
  modified_base 38: mod_base = OTHER; note = uracil
  modified_base 41: mod_base = OTHER; note = uracil
  modified_base 66..67: mod_base = OTHER; note = uracil
  modified_base 69..71: mod_base = OTHER; note = uracil
  modified_base 75: mod_base = OTHER; note = uracil
  modified_base 78..80: mod_base = OTHER; note = uracil
  modified_base 82: mod_base = OTHER; note = uracil
  modified_base 84: mod_base = OTHER; note = uracil
  modified_base 96..98: mod_base = OTHER; note = uracil
  modified_base 107..109: mod_base = OTHER; note = uracil
  modified_base 114: mod_base = OTHER; note = uracil
  modified_base 119: mod_base = OTHER; note = uracil
  modified_base 121..122: mod_base = OTHER; note = uracil
  modified_base 131: mod_base = OTHER; note = uracil
  modified_base 134: mod_base = OTHER; note = uracil
  modified_base 141: mod_base = OTHER; note = uracil
  modified_base 144: mod_base = OTHER; note = uracil
  modified_base 146: mod_base = OTHER; note = uracil
  modified_base 149: mod_base = OTHER; note = uracil
  modified_base 153: mod_base = OTHER; note = uracil
  modified_base 164: mod_base = OTHER; note = uracil
  modified_base 168: mod_base = OTHER; note = uracil
  modified_base 170: mod_base = OTHER; note = uracil
  modified_base 173: mod_base = OTHER; note = uracil
  modified_base 176: mod_base = OTHER; note = uracil
  modified_base 186..187: mod_base = OTHER; note = uracil
  modified_base 194: mod_base = OTHER; note = uracil
  modified_base 205: mod_base = OTHER; note = uracil
  modified_base 218..219: mod_base = OTHER; note = uracil
  modified_base 221: mod_base = OTHER; note = uracil
  modified_base 243: mod_base = OTHER; note = uracil
  modified_base 246: mod_base = OTHER; note = uracil
  modified_base 250: mod_base = OTHER; note = uracil
  modified_base 259: mod_base = OTHER; note = uracil
  modified_base 264: mod_base = OTHER; note = uracil
  modified_base 267: mod_base = OTHER; note = uracil
  modified_base 276..279: mod_base = OTHER; note = uracil
  modified_base 281: mod_base = OTHER; note = uracil
  modified_base 283: mod_base = OTHER; note = uracil
  modified_base 285..286: mod_base = OTHER; note = uracil
  modified_base 296: mod_base = OTHER; note = uracil
  modified_base 301: mod_base = OTHER; note = uracil
  modified_base 1: mod_base = m5c
  modified_base 16: mod_base = m5c
  modified_base 42: mod_base = m5c
  modified_base 47: mod_base = m5c
  modified_base 54: mod_base = m5c
  modified_base 72: mod_base = m5c
  modified_base 88: mod_base = m5c
  modified_base 99: mod_base = m5c
  modified_base 195: mod_base = m5c
  modified_base 200: mod_base = m5c
  modified_base 215: mod_base = m5c
  modified_base 261: mod_base = m5c
  variation 132: note = CpG site, residue is C if methylated or T(=U) if unmethylated
  variation 151: note = CpG site, residue is C if methylated or T(=U) if unmethylated
cgatgggtatgatttcgtttagttgtttttggaggttttgtcggggcggtgggcggggaggggggttttttcggttgtttttattagcggaggagtttcgggaagattttgtgtattgttttagggggagtygtaggaggttgtttttttygttgatggtgggtagatatttttttttaaggatgtttgtgggtcggggcggggttgtgaggtgcggttataggagaatgtgaggtatgaggttgttgattaggggagttcggtagttgggggtgttttatttatttttgtgaggttgggt

SEQ ID NO: 31 - DNA, 300 bp, synthetic construct
  source 1..300: mol_type = other DNA
  modified_base 2..3: mod_base = OTHER; note = uracil
  modified_base 14..15: mod_base = OTHER; note = uracil
  modified_base 30: mod_base = OTHER; note = uracil
  modified_base 38..40: mod_base = OTHER; note = uracil
  modified_base 42: mod_base = OTHER; note = uracil
  modified_base 45: mod_base = OTHER; note = uracil
  modified_base 51..52: mod_base = OTHER; note = uracil
  modified_base 58..60: mod_base = OTHER; note = uracil
  modified_base 62..63: mod_base = OTHER; note = uracil
  modified_base 65..67: mod_base = OTHER; note = uracil
  modified_base 69..71: mod_base = OTHER; note = uracil
  modified_base 75: mod_base = OTHER; note = uracil
  modified_base 80..81: mod_base = OTHER; note = uracil
  modified_base 83: mod_base = OTHER; note = uracil
  modified_base 89: mod_base = OTHER; note = uracil
  modified_base 93: mod_base = OTHER; note = uracil
  modified_base 99..100: mod_base = OTHER; note = uracil
  modified_base 113..114: mod_base = OTHER; note = uracil
  modified_base 116: mod_base = OTHER; note = uracil
  modified_base 118: mod_base = OTHER; note = uracil
  modified_base 124: mod_base = OTHER; note = uracil
  modified_base 127: mod_base = OTHER; note = uracil
  modified_base 130: mod_base = OTHER; note = uracil
  modified_base 133: mod_base = OTHER; note = uracil
  modified_base 137: mod_base = OTHER; note = uracil
  modified_base 139: mod_base = OTHER; note = uracil
  modified_base 145: mod_base = OTHER; note = uracil
  modified_base 147: mod_base = OTHER; note = uracil
  modified_base 153: mod_base = OTHER; note = uracil
  modified_base 169..170: mod_base = OTHER; note = uracil
  modified_base 181..182: mod_base = OTHER; note = uracil
  modified_base 194..196: mod_base = OTHER; note = uracil
  modified_base 200..202: mod_base = OTHER; note = uracil
  modified_base 204: mod_base = OTHER; note = uracil
  modified_base 213: mod_base = OTHER; note = uracil
  modified_base 219: mod_base = OTHER; note = uracil
  modified_base 221: mod_base = OTHER; note = uracil
  modified_base 229: mod_base = OTHER; note = uracil
  modified_base 235: mod_base = OTHER; note = uracil
  modified_base 237: mod_base = OTHER; note = uracil
  modified_base 245: mod_base = OTHER; note = uracil
  modified_base 254: mod_base = OTHER; note = uracil
  modified_base 257..259: mod_base = OTHER; note = uracil
  modified_base 268: mod_base = OTHER; note = uracil
  modified_base 271..273: mod_base = OTHER; note = uracil
  modified_base 275: mod_base = OTHER; note = uracil
  modified_base 288: mod_base = OTHER; note = uracil
  modified_base 292: mod_base = OTHER; note = uracil
  modified_base 297: mod_base = OTHER; note = uracil
  modified_base 300: mod_base = OTHER; note = uracil
  modified_base 94: mod_base = m5c
  modified_base 189: mod_base = m5c
  modified_base 222: mod_base = m5c
  modified_base 230: mod_base = m5c
  modified_base 238: mod_base = m5c
  modified_base 264: mod_base = m5c
  modified_base 290: mod_base = m5c
  modified_base 298: mod_base = m5c
  variation 143: note = CpG site, residue is C if methylated or T(=U) if unmethylated
  variation 155: note = CpG site, residue is C if methylated or T(=U) if unmethylated
  variation 159: note = CpG site, residue is C if methylated or T(=U) if unmethylated
tttagaataatggtttggtttgtagagattagaaatgtttattgttgttttttgtatttttttatttatttagattgagtttttgaagttgttcggggtttggagagagaagttatttaaggatagtagttgttgatttagaygtttaaattttygggyggaaaaggattttagagaatgtttaaaatcgtggtttaattttttattggaagttggggtttcgaaaagtcggggtttcgaaaagttgggagagtagtttaaagcgtattgtttattaaatgtggatgtacgttggatcgt

SEQ ID NO: 32 - DNA, 300 bp, synthetic construct
  source 1..300: mol_type = other DNA
  modified_base 6..7: mod_base = OTHER; note = uracil
  modified_base 14: mod_base = OTHER; note = uracil
  modified_base 17..18: mod_base = OTHER; note = uracil
  modified_base 20: mod_base = OTHER; note = uracil
  modified_base 31: mod_base = OTHER; note = uracil
  modified_base 38: mod_base = OTHER; note = uracil
  modified_base 45: mod_base = OTHER; note = uracil
  modified_base 48: mod_base = OTHER; note = uracil
  modified_base 50: mod_base = OTHER; note = uracil
  modified_base 52..54: mod_base = OTHER; note = uracil
  modified_base 57: mod_base = OTHER; note = uracil
  modified_base 67..69: mod_base = OTHER; note = uracil
  modified_base 73: mod_base = OTHER; note = uracil
  modified_base 83..86: mod_base = OTHER; note = uracil
  modified_base 89: mod_base = OTHER; note = uracil
  modified_base 92..93: mod_base = OTHER; note = uracil
  modified_base 108..109: mod_base = OTHER; note = uracil
  modified_base 121: mod_base = OTHER; note = uracil
  modified_base 125: mod_base = OTHER; note = uracil
  modified_base 127: mod_base = OTHER; note = uracil
  modified_base 134..135: mod_base = OTHER; note = uracil
  modified_base 140: mod_base = OTHER; note = uracil
  modified_base 143..144: mod_base = OTHER; note = uracil
  modified_base 160: mod_base = OTHER; note = uracil
  modified_base 166: mod_base = OTHER; note = uracil
  modified_base 169: mod_base = OTHER; note = uracil
  modified_base 172: mod_base = OTHER; note = uracil
  modified_base 175: mod_base = OTHER; note = uracil
  modified_base 179..180: mod_base = OTHER; note = uracil
  modified_base 189: mod_base = OTHER; note = uracil
  modified_base 192: mod_base = OTHER; note = uracil
  modified_base 194: mod_base = OTHER; note = uracil
  modified_base 196: mod_base = OTHER; note = uracil
  modified_base 198..199: mod_base = OTHER; note = uracil
  modified_base 203..205: mod_base = OTHER; note = uracil
  modified_base 210: mod_base = OTHER; note = uracil
  modified_base 213: mod_base = OTHER; note = uracil
  modified_base 216: mod_base = OTHER; note = uracil
  modified_base 222: mod_base = OTHER; note = uracil
  modified_base 224: mod_base = OTHER; note = uracil
  modified_base 228: mod_base = OTHER; note = uracil
  modified_base 247: mod_base = OTHER; note = uracil
  modified_base 254: mod_base = OTHER; note = uracil
  modified_base 257: mod_base = OTHER; note = uracil
  modified_base 264: mod_base = OTHER; note = uracil
  modified_base 269: mod_base = OTHER; note = uracil
  modified_base 274: mod_base = OTHER; note = uracil
  modified_base 276: mod_base = OTHER; note = uracil
  modified_base 279: mod_base = OTHER; note = uracil
  modified_base 283..284: mod_base = OTHER; note = uracil
  modified_base 288..289: mod_base = OTHER; note = uracil
  modified_base 296: mod_base = OTHER; note = uracil
  modified_base 2: mod_base = m5c
  modified_base 10: mod_base = m5c
  modified_base 36: mod_base = m5c
  modified_base 62: mod_base = m5c
  modified_base 70: mod_base = m5c
  modified_base 78: mod_base = m5c
  modified_base 111: mod_base = m5c
  modified_base 206: mod_base = m5c
  variation 141: note = CpG site, residue is C if methylated or T(=U) if unmethylated
  variation 145: note = CpG site, residue is C if methylated or T(=U) if unmethylated
  variation 157: note = CpG site, residue is C if methylated or T(=U) if unmethylated
gcggtttagcgtgtatttatatttagtgggtagtacgttttgggttgtttttttagtttttcggagtttcggtttttcggagttttagtttttaatgagggattgggttacgattttaggtattttttaaggttttttttygttygagaatttgagygtttgagttagtagttgttgtttttgagtggtttttttttttaggtttcggatagttttagaggtttagtttgggtgggtggagggatataggaaatagtagtgggtatttttgatttttataaattaggttattattttgga

SEQ ID NO: 33 - DNA, 300 bp, synthetic construct
  source 1..300: mol_type = other DNA
  modified_base 6: mod_base = OTHER; note = uracil
  modified_base 12: mod_base = OTHER; note = uracil
  modified_base 26..27: mod_base = OTHER; note = uracil
  modified_base 32..33: mod_base = OTHER; note = uracil
  modified_base 61..62: mod_base = OTHER; note = uracil
  modified_base 64..68: mod_base = OTHER; note = uracil
  modified_base 75: mod_base = OTHER; note = uracil
  modified_base 105: mod_base = OTHER; note = uracil
  modified_base 110..111: mod_base = OTHER; note = uracil
  modified_base 113: mod_base = OTHER; note = uracil
  modified_base 116..117: mod_base = OTHER; note = uracil
  modified_base 120: mod_base = OTHER; note = uracil
  modified_base 122: mod_base = OTHER; note = uracil
  modified_base 136..137: mod_base = OTHER; note = uracil
  modified_base 140: mod_base = OTHER; note = uracil
  modified_base 146: mod_base = OTHER; note = uracil
  modified_base 149: mod_base = OTHER; note = uracil
  modified_base 153: mod_base = OTHER; note = uracil
  modified_base 162: mod_base = OTHER; note = uracil
  modified_base 166: mod_base = OTHER; note = uracil
  modified_base 168: mod_base = OTHER; note = uracil
  modified_base 170: mod_base = OTHER; note = uracil
  modified_base 173: mod_base = OTHER; note = uracil
  modified_base 177..178: mod_base = OTHER; note = uracil
  modified_base 183: mod_base = OTHER; note = uracil
  modified_base 188: mod_base = OTHER; note = uracil
  modified_base 195: mod_base = OTHER; note = uracil
  modified_base 202: mod_base = OTHER; note = uracil
  modified_base 204..205: mod_base = OTHER; note = uracil
  modified_base 207..209: mod_base = OTHER; note = uracil
  modified_base 212..213: mod_base = OTHER; note = uracil
  modified_base 216..218: mod_base = OTHER; note = uracil
  modified_base 221..225: mod_base = OTHER; note = uracil
  modified_base 228: mod_base = OTHER; note = uracil
  modified_base 232: mod_base = OTHER; note = uracil
  modified_base 236: mod_base = OTHER; note = uracil
  modified_base 240: mod_base = OTHER; note = uracil
  modified_base 245..246: mod_base = OTHER; note = uracil
  modified_base 250..252: mod_base = OTHER; note = uracil
  modified_base 254: mod_base = OTHER; note = uracil
  modified_base 259..262: mod_base = OTHER; note = uracil
  modified_base 268: mod_base = OTHER; note = uracil
  modified_base 271..272: mod_base = OTHER; note = uracil
  modified_base 275..276: mod_base = OTHER; note = uracil
  modified_base 280: mod_base = OTHER; note = uracil
  modified_base 286: mod_base = OTHER; note = uracil
  modified_base 288: mod_base = OTHER; note = uracil
  modified_base 290: mod_base = OTHER; note = uracil
  modified_base 293..294: mod_base = OTHER; note = uracil
  modified_base 296: mod_base = OTHER; note = uracil
  modified_base 123: mod_base = m5c
  modified_base 133: mod_base = m5c
  modified_base 171: mod_base = m5c
  modified_base 189: mod_base = m5c
  modified_base 230: mod_base = m5c
  modified_base 248: mod_base = m5c
  variation 151: note = CpG site, residue is C if methylated or T(=U) if unmethylated
aagttttggggtagaagttggataattagggtttgagaaataaagataagagggtatattttttttttaggagataaaagagaaggtggatggagaaggggaaattgggttttagttagtatcgggatgatgcgattagttttgttagtaygtttggggagtatatatatcgtttgttttggttggatcggagattgtgattattatttttttaatttattttttaatacgtaggttggtatggttacgtttatagtgttttaagtgttgtttgttttgtagtgatttattttttttgta

SEQ ID NO: 34 - DNA, 300 bp, synthetic construct
  source 1..300: mol_type = other DNA
  modified_base 3: mod_base = OTHER; note = uracil
  modified_base 17: mod_base = OTHER; note = uracil
  modified_base 19: mod_base = OTHER; note = uracil
  modified_base 22: mod_base = OTHER; note = uracil
  modified_base 27: mod_base = OTHER; note = uracil
  modified_base 31: mod_base = OTHER; note = uracil
  modified_base 34: mod_base = OTHER; note = uracil
  modified_base 36: mod_base = OTHER; note = uracil
  modified_base 43: mod_base = OTHER; note = uracil
  modified_base 45: mod_base = OTHER; note = uracil
  modified_base 57..58: mod_base = OTHER; note = uracil
  modified_base 62..63: mod_base = OTHER; note = uracil
  modified_base 66..67: mod_base = OTHER; note = uracil
  modified_base 102: mod_base = OTHER; note = uracil
  modified_base 104: mod_base = OTHER; note = uracil
  modified_base 108: mod_base = OTHER; note = uracil
  modified_base 110: mod_base = OTHER; note = uracil
  modified_base 115..116: mod_base = OTHER; note = uracil
  modified_base 119..120: mod_base = OTHER; note = uracil
  modified_base 125: mod_base = OTHER; note = uracil
  modified_base 140: mod_base = OTHER; note = uracil
  modified_base 142..145: mod_base = OTHER; note = uracil
  modified_base 153: mod_base = OTHER; note = uracil
  modified_base 157: mod_base = OTHER; note = uracil
  modified_base 162: mod_base = OTHER; note = uracil
  modified_base 169: mod_base = OTHER; note = uracil
  modified_base 172: mod_base = OTHER; note = uracil
  modified_base 175..176: mod_base = OTHER; note = uracil
  modified_base 182: mod_base = OTHER; note = uracil
  modified_base 186: mod_base = OTHER; note = uracil
  modified_base 192..194: mod_base = OTHER; note = uracil
  modified_base 200..203: mod_base = OTHER; note = uracil
  modified_base 206: mod_base = OTHER; note = uracil
  modified_base 208..209: mod_base = OTHER; note = uracil
  modified_base 212..213: mod_base = OTHER; note = uracil
  modified_base 215..216: mod_base = OTHER; note = uracil
  modified_base 219: mod_base = OTHER; note = uracil
  modified_base 221: mod_base = OTHER; note = uracil
  modified_base 228: mod_base = OTHER; note = uracil
  modified_base 230..231: mod_base = OTHER; note = uracil
  modified_base 247..249: mod_base = OTHER; note = uracil
  modified_base 251: mod_base = OTHER; note = uracil
  modified_base 256: mod_base = OTHER; note = uracil
  modified_base 264: mod_base = OTHER; note = uracil
  modified_base 266: mod_base = OTHER; note = uracil
  modified_base 270..272: mod_base = OTHER; note = uracil
  modified_base 280..281: mod_base = OTHER; note = uracil
  modified_base 284: mod_base = OTHER; note = uracil
  modified_base 287: mod_base = OTHER; note = uracil
  modified_base 290..293: mod_base = OTHER; note = uracil
  modified_base 298: mod_base = OTHER; note = uracil
  modified_base 52: mod_base = m5c
  modified_base 70: mod_base = m5c
  modified_base 111: mod_base = m5c
  modified_base 129: mod_base = m5c
  modified_base 167: mod_base = m5c
  modified_base 177: mod_base = m5c
  variation 149: note = CpG site, residue is C if methylated or T(=U) if unmethylated
tatagaggaagtgagttattgtaaggtaggtagtatttggggtattgtgggcgtggttatgttagtttgcgtgttgggggatgggttggaagggtggtgattatagttttcggtttagttaaggtaagcggtgtgtatgttttttaagygtgttgataaagttggtcgtattatttcggtgttggttgaggtttagtttttttttttttatttatttttttttttgttttttgggggaggaatatatttttttatttttattttttaggttttggttatttaatttttgttttagaattt

SEQ ID NO: 35 - DNA, 300 bp, synthetic construct
  source 1..300: mol_type = other DNA
  modified_base 2: mod_base = OTHER; note = uracil
  modified_base 11..13: mod_base = OTHER; note = uracil
  modified_base 15: mod_base = OTHER; note = uracil
  modified_base 17: mod_base = OTHER; note = uracil
  modified_base 21..23: mod_base = OTHER; note = uracil
  modified_base 27..29: mod_base = OTHER; note = uracil
  modified_base 31: mod_base = OTHER; note = uracil
  modified_base 35..36: mod_base = OTHER; note = uracil
  modified_base 39: mod_base = OTHER; note = uracil
  modified_base 46..47: mod_base = OTHER; note = uracil
  modified_base 50..56: mod_base = OTHER; note = uracil
  modified_base 59: mod_base = OTHER; note = uracil
  modified_base 65..66: mod_base = OTHER; note = uracil
  modified_base 68: mod_base = OTHER; note = uracil
  modified_base 71: mod_base = OTHER; note = uracil
  modified_base 78..79: mod_base = OTHER; note = uracil
  modified_base 82..84: mod_base = OTHER; note = uracil
  modified_base 89..91: mod_base = OTHER; note = uracil
  modified_base 94: mod_base = OTHER; note = uracil
  modified_base 101: mod_base = OTHER; note = uracil
  modified_base 107: mod_base = OTHER; note = uracil
  modified_base 110..111: mod_base = OTHER; note = uracil
  modified_base 116: mod_base = OTHER; note = uracil
  modified_base 120..121: mod_base = OTHER; note = uracil
  modified_base 126: mod_base = OTHER; note = uracil
  modified_base 133..136: mod_base = OTHER; note = uracil
  modified_base 142..144: mod_base = OTHER; note = uracil
  modified_base 157: mod_base = OTHER; note = uracil
  modified_base 168: mod_base = OTHER; note = uracil
  modified_base 178: mod_base = OTHER; note = uracil
  modified_base 184: mod_base = OTHER; note = uracil
  modified_base 186..187: mod_base = OTHER; note = uracil
  modified_base 194: mod_base = OTHER; note = uracil
  modified_base 202: mod_base = OTHER; note = uracil
  modified_base 204: mod_base = OTHER; note = uracil
  modified_base 206: mod_base = OTHER; note = uracil
  modified_base 209..210: mod_base = OTHER; note = uracil
  modified_base 212: mod_base = OTHER; note = uracil
  modified_base 214..218: mod_base = OTHER; note = uracil
  modified_base 220: mod_base = OTHER; note = uracil
  modified_base 229: mod_base = OTHER; note = uracil
  modified_base 231: mod_base = OTHER; note = uracil
  modified_base 233: mod_base = OTHER; note = uracil
  modified_base 238: mod_base = OTHER; note = uracil
  modified_base 242: mod_base = OTHER; note = uracil
  modified_base 244: mod_base = OTHER; note = uracil
  modified_base 249: mod_base = OTHER; note = uracil
  modified_base 252: mod_base = OTHER; note = uracil
  modified_base 266: mod_base = OTHER; note = uracil
  modified_base 270..272: mod_base = OTHER; note = uracil
  modified_base 274: mod_base = OTHER; note = uracil
  modified_base 276..277: mod_base = OTHER; note = uracil
  modified_base 283..284: mod_base = OTHER; note = uracil
  modified_base 287..288: mod_base = OTHER; note = uracil
  modified_base 293: mod_base = OTHER; note = uracil
  modified_base 300: mod_base = OTHER; note = uracil
  modified_base 7: mod_base = m5c
  modified_base 95: mod_base = m5c
  modified_base 131: mod_base = m5c
  modified_base 234: mod_base = m5c
  modified_base 268: mod_base = m5c
  modified_base 297: mod_base = m5c
  variation 149: note = CpG site, residue is C if methylated or T(=U) if unmethylated
ttagaacgtgtttatatatgtttatgttttttattttgttgaaatttaattttttttttaaaggttattgtagggagtttttttagggtttaatcggatttagtgtttatttgttttgttttgtataaagcgttttttttgtttttttygtgtgtatttagagaattttgattttgattgaattatttgtgtatttgtttttttttagttttatttttatatggtgagtttatcggttttatttatttttgtatgaggtaagggtttcgtttatattaggtgttaattagtgtttacggt

SEQ ID NO: 36 - DNA, 300 bp, synthetic construct
  source 1..300: mol_type = other DNA
  modified_base 1: mod_base = OTHER; note = uracil
  modified_base 8: mod_base = OTHER; note = uracil
  modified_base 10: mod_base = OTHER; note = uracil
  modified_base 18: mod_base = OTHER; note = uracil
  modified_base 20..21: mod_base = OTHER; note = uracil
  modified_base 36..38: mod_base = OTHER; note = uracil
  modified_base 42..43: mod_base = OTHER; note = uracil
  modified_base 45: mod_base = OTHER; note = uracil
  modified_base 49: mod_base = OTHER; note = uracil
  modified_base 64: mod_base = OTHER; note = uracil
  modified_base 72: mod_base = OTHER; note = uracil
  modified_base 74: mod_base = OTHER; note = uracil
  modified_base 76..77: mod_base = OTHER; note = uracil
  modified_base 92: mod_base = OTHER; note = uracil
  modified_base 103: mod_base = OTHER; note = uracil
  modified_base 109: mod_base = OTHER; note = uracil
  modified_base 111: mod_base = OTHER; note = uracil
  modified_base 120: mod_base = OTHER; note = uracil
  modified_base 124: mod_base = OTHER; note = uracil
  modified_base 130: mod_base = OTHER; note = uracil
  modified_base 137: mod_base = OTHER; note = uracil
  modified_base 139: mod_base = OTHER; note = uracil
  modified_base 146: mod_base = OTHER; note = uracil
  modified_base 148: mod_base = OTHER; note = uracil
  modified_base 159: mod_base = OTHER; note = uracil
  modified_base 170: mod_base = OTHER; note = uracil
  modified_base 177: mod_base = OTHER; note = uracil
  modified_base 182: mod_base = OTHER; note = uracil
  modified_base 187: mod_base = OTHER; note = uracil
  modified_base 195: mod_base = OTHER; note = uracil
  modified_base 197: mod_base = OTHER; note = uracil
  modified_base 203: mod_base = OTHER; note = uracil
  modified_base 212..214: mod_base = OTHER; note = uracil
  modified_base 223: mod_base = OTHER; note = uracil
  modified_base 225..227: mod_base = OTHER; note = uracil
  modified_base 230: mod_base = OTHER; note = uracil
  modified_base 236..237: mod_base = OTHER; note = uracil
  modified_base 259: mod_base = OTHER; note = uracil
  modified_base 262: mod_base = OTHER; note = uracil
  modified_base 274: mod_base = OTHER; note = uracil
  modified_base 280: mod_base = OTHER; note = uracil
  modified_base 290: mod_base = OTHER; note = uracil
  modified_base 296: mod_base = OTHER; note = uracil
  modified_base 2: mod_base = m5c
  modified_base 31: mod_base = m5c
  modified_base 65: mod_base = m5c
  modified_base 168: mod_base = m5c
  modified_base 204: mod_base = m5c
  modified_base 292: mod_base = m5c
  variation 150: note = CpG site, residue is C if methylated or T(=U) if unmethylated
tcgtaagtattggttggtatttggtgtgggcgagatttttattttatgtagaaatgagtaagatcggtgagtttattatgtgggggtgaggttgagagaaaataagtatataggtgatttagttaaaattagaattttttaagtatataygaaaagggtaaaaggggcgttttgtataggatagaataggtagatattgaattcggttgggttttgggaaggttttttgtagtggtttttgaagggggggttggattttagtaggatagagggtatgggtatgtgtgggtacgttttgaa

SEQ ID NO: 37 - DNA, 300 bp, synthetic construct
  source 1..300: mol_type = other DNA
  modified_base 1: mod_base = OTHER; note = uracil
  modified_base 3..4: mod_base = OTHER; note = uracil
  modified_base 10..13: mod_base = OTHER; note = uracil
  modified_base 15: mod_base = OTHER; note = uracil
  modified_base 17..18: mod_base = OTHER; note = uracil
  modified_base 25: mod_base = OTHER; note = uracil
  modified_base 27: mod_base = OTHER; note = uracil
  modified_base 37: mod_base = OTHER; note = uracil
  modified_base 40: mod_base = OTHER; note = uracil
  modified_base 43: mod_base = OTHER; note = uracil
  modified_base 58: mod_base = OTHER; note = uracil
  modified_base 65..66: mod_base = OTHER; note = uracil
  modified_base 73: mod_base = OTHER; note = uracil
  modified_base 104: mod_base = OTHER; note = uracil
  modified_base 109: mod_base = OTHER; note = uracil
  modified_base 115: mod_base = OTHER; note = uracil
  modified_base 119: mod_base = OTHER; note = uracil
  modified_base 125: mod_base = OTHER; note = uracil
  modified_base 129: mod_base = OTHER; note = uracil
  modified_base 132: mod_base = OTHER; note = uracil
  modified_base 150: mod_base = OTHER; note = uracil
  modified_base 152: mod_base = OTHER; note = uracil
  modified_base 158..159: mod_base = OTHER; note = uracil
  modified_base 162: mod_base = OTHER; note = uracil
  modified_base 165: mod_base = OTHER; note = uracil
  modified_base 172: mod_base = OTHER; note = uracil
  modified_base 177..182: mod_base = OTHER; note = uracil
  modified_base 184: mod_base = OTHER; note = uracil
  modified_base 186..188: mod_base = OTHER; note = uracil
  modified_base 191..192: mod_base = OTHER; note = uracil
  modified_base 195..196: mod_base = OTHER; note = uracil
  modified_base 199..201: mod_base = OTHER; note = uracil
  modified_base 206: mod_base = OTHER; note = uracil
  modified_base 208: mod_base = OTHER; note = uracil
  modified_base 211: mod_base = OTHER; note = uracil
  modified_base 217: mod_base = OTHER; note = uracil
  modified_base 224: mod_base = OTHER; note = uracil
  modified_base 231: mod_base = OTHER; note = uracil
  modified_base 236..238: mod_base = OTHER; note = uracil
  modified_base 241..245: mod_base = OTHER; note = uracil
  modified_base 247..250: mod_base = OTHER; note = uracil
  modified_base 253..254: mod_base = OTHER; note = uracil
  modified_base 256..257: mod_base = OTHER; note = uracil
  modified_base 260..261: mod_base = OTHER; note = uracil
  modified_base 263: mod_base = OTHER; note = uracil
  modified_base 266..267: mod_base = OTHER; note = uracil
  modified_base 269..270: mod_base = OTHER; note = uracil
  modified_base 272..273: mod_base = OTHER; note = uracil
  modified_base 275..278: mod_base = OTHER; note = uracil
  modified_base 281..282: mod_base = OTHER; note = uracil
  modified_base 286..287: mod_base = OTHER; note = uracil
  modified_base 299: mod_base = OTHER; note = uracil
  modified_base 6: mod_base = m5c
  modified_base 67: mod_base = m5c
  modified_base 123: mod_base = m5c
  modified_base 163: mod_base = m5c
  modified_base 173: mod_base = m5c
  modified_base 189: mod_base = m5c
  modified_base 193: mod_base = m5c
  modified_base 197: mod_base = m5c
  modified_base 212: mod_base = m5c
  modified_base 239: mod_base = m5c
  variation 146: note = CpG site, residue is C if methylated or T(=U) if unmethylated
  variation 156: note = CpG site, residue is C if methylated or T(=U) if unmethylated
tatttcgtgttttttatttgtaagtattgtgaggagtagtagtaggaagaaaggagattgggtgttcggtgttatggtggtggtgaaatgggtggggagggggtagaatagatttaggtaggcgttggttgtttgagaggtggagygggtataggygtttatcgttttatatcggtttttttatttttcgttcgttcgttttaggtatagtcggagtaggtgataggtgataaaatttcgtttttttttttattttttatttttttttttttttttttaattatttttgggtagggtata

SEQ ID NO: 38 - DNA, 300 bp, synthetic construct
  source 1..300: mol_type = other DNA
  modified_base 5..7: mod_base = OTHER; note = uracil
  modified_base 10..12: mod_base = OTHER; note = uracil
  modified_base 72: mod_base = OTHER; note = uracil
  modified_base 74..75: mod_base = OTHER; note = uracil
  modified_base 79: mod_base = OTHER; note = uracil
  modified_base 81..82: mod_base = OTHER; note = uracil
  modified_base 85: mod_base = OTHER; note = uracil
  modified_base 87: mod_base = OTHER; note = uracil
  modified_base 91: mod_base = OTHER; note = uracil
  modified_base 96..97: mod_base = OTHER; note = uracil
  modified_base 126: mod_base = OTHER; note = uracil
  modified_base 146..147: mod_base = OTHER; note = uracil
  modified_base 152..153: mod_base = OTHER; note = uracil
  modified_base 156: mod_base = OTHER; note = uracil
  modified_base 158..159: mod_base = OTHER; note = uracil
  modified_base 161..162: mod_base = OTHER; note = uracil
  modified_base 164: mod_base = OTHER; note = uracil
  modified_base 166: mod_base = OTHER; note = uracil
  modified_base 170: mod_base = OTHER; note = uracil
  modified_base 173..174: mod_base = OTHER; note = uracil
  modified_base 179..180: mod_base = OTHER; note = uracil
  modified_base 183..184: mod_base = OTHER; note = uracil
  modified_base 190: mod_base = OTHER; note = uracil
  modified_base 195: mod_base = OTHER; note = uracil
  modified_base 198..202: mod_base = OTHER; note = uracil
  modified_base 204..207: mod_base = OTHER; note = uracil
  modified_base 209..211: mod_base = OTHER; note = uracil
  modified_base 216: mod_base = OTHER; note = uracil
  modified_base 218..219: mod_base = OTHER; note = uracil
  modified_base 221..222: mod_base = OTHER; note = uracil
  modified_base 224..225: mod_base = OTHER; note = uracil
  modified_base 230: mod_base = OTHER; note = uracil
  modified_base 232: mod_base = OTHER; note = uracil
  modified_base 237: mod_base = OTHER; note = uracil
  modified_base 239..241: mod_base = OTHER; note = uracil
  modified_base 245: mod_base = OTHER; note = uracil
  modified_base 247..248: mod_base = OTHER; note = uracil
  modified_base 252: mod_base = OTHER; note = uracil
  modified_base 255..256: mod_base = OTHER; note = uracil
  modified_base 259: mod_base = OTHER; note = uracil
  modified_base 262: mod_base = OTHER; note = uracil
  modified_base 265: mod_base = OTHER; note = uracil
  modified_base 267..268: mod_base = OTHER; note = uracil
  modified_base 270: mod_base = OTHER; note = uracil
  modified_base 272: mod_base = OTHER; note = uracil
  modified_base 277: mod_base = OTHER; note = uracil
  modified_base 281: mod_base = OTHER; note = uracil
  modified_base 292: mod_base = OTHER; note = uracil
  modified_base 61: mod_base = m5c
  modified_base 88: mod_base = m5c
  modified_base 103: mod_base = m5c
  modified_base 107: mod_base = m5c
  modified_base 111: mod_base = m5c
  modified_base 127: mod_base = m5c
  modified_base 137: mod_base = m5c
  modified_base 177: mod_base = m5c
  modified_base 233: mod_base = m5c
  modified_base 294: mod_base = m5c
  variation 144: note = CpG site, residue is C if methylated or T(=U) if unmethylated
  variation 154: note = CpG site, residue is C if methylated or T(=U) if unmethylated
tgtattttatttaggaatggttggggaggaggaggaagaggtaggaggtaggggagggggcggggttttgttatttgttatttgtttcggttgtgtttagggcgggcgggcggggagtggggggatcggtataaagcggtaggygtttgtgttygttttattttttaagtagttagcgtttgtttgaatttgttttgttttttttttatttattttattattattatgatatcgggtatttagttttttttttttttgttgttgttttttatagtgtttataggtgaggggtacgaggtg

SEQ ID NO: 39 - DNA, 300 bp, synthetic construct
  source 1..300: mol_type = other DNA
  modified_base 12: mod_base = OTHER; note = uracil
  modified_base 25: mod_base = OTHER; note = uracil
  modified_base 36..37: mod_base = OTHER; note = uracil
  modified_base 45: mod_base = OTHER; note = uracil
  modified_base 49..50: mod_base = OTHER; note = uracil
  modified_base 56..57: mod_base = OTHER; note = uracil
  modified_base 63: mod_base = OTHER; note = uracil
  modified_base 70: mod_base = OTHER; note = uracil
  modified_base 73: mod_base = OTHER; note = uracil
  modified_base 86..87: mod_base = OTHER; note = uracil
  modified_base 98: mod_base = OTHER; note = uracil
  modified_base 110..111: mod_base = OTHER; note = uracil
  modified_base 119: mod_base = OTHER; note = uracil
  modified_base 123..124: mod_base = OTHER; note = uracil
  modified_base 128..129: mod_base = OTHER; note = uracil
  modified_base 133..134: mod_base = OTHER; note = uracil
  modified_base 147..148: mod_base = OTHER; note = uracil
  modified_base 154..155: mod_base = OTHER; note = uracil
  modified_base 162..164: mod_base = OTHER; note = uracil
  modified_base 173: mod_base = OTHER; note = uracil
  modified_base 179: mod_base = OTHER; note = uracil
  modified_base 186..188: mod_base = OTHER; note = uracil
  modified_base 191: mod_base = OTHER; note = uracil
  modified_base 194: mod_base = OTHER; note = uracil
  modified_base 197..199: mod_base = OTHER; note = uracil
  modified_base 202..206: mod_base = OTHER; note = uracil
  modified_base 208..210: mod_base = OTHER; note = uracil
  modified_base 212..215: mod_base = OTHER; note = uracil
  modified_base 219: mod_base = OTHER; note = uracil
  modified_base 221: mod_base = OTHER; note = uracil
  modified_base 223..225: mod_base = OTHER; note = uracil
  modified_base 227..229: mod_base = OTHER; note = uracil
  modified_base 232: mod_base = OTHER; note = uracil
  modified_base 234..235: mod_base = OTHER; note = uracil
  modified_base 238: mod_base = OTHER; note = uracil
  modified_base 256..258: mod_base = OTHER; note = uracil
  modified_base 261: mod_base = OTHER; note = uracil
  modified_base 264: mod_base = OTHER; note = uracil
  modified_base 269..271: mod_base = OTHER; note = uracil
  modified_base 274..276: mod_base = OTHER; note = uracil
  modified_base 282..284: mod_base = OTHER; note = uracil
  modified_base 287..289: mod_base = OTHER; note = uracil
  modified_base 293..296: mod_base = OTHER; note = uracil
  modified_base 298..299: mod_base = OTHER; note = uracil
  modified_base 4: mod_base = m5c
  modified_base 18: mod_base = m5c
  modified_base 29: mod_base = m5c
  modified_base 39: mod_base = m5c
  modified_base 58: mod_base = m5c
  modified_base 64: mod_base = m5c
  modified_base 71: mod_base = m5c
  modified_base 81: mod_base = m5c
  modified_base 91: mod_base = m5c
  modified_base 120: mod_base = m5c
  modified_base 125: mod_base = m5c
  modified_base 137: mod_base = m5c
  modified_base 139: mod_base = m5c
  modified_base 156: mod_base = m5c
  modified_base 169: mod_base = m5c
  modified_base 174: mod_base = m5c
  modified_base 181: mod_base = m5c
  modified_base 189: mod_base = m5c
  modified_base 192: mod_base = m5c
  modified_base 244: mod_base = m5c
  variation 151: note = CpG site, residue is C if methylated or T(=U) if unmethylated
agacggagaaatagaaacggaggttaggcggggagtttcggggataggtttgggattcgaggtcggaaatcgtagaggagcgaagtttggcgggatgtagtgattggagttaaaggaatcgtttcggtttgtttaacgcgggggggttttyggttcggtggttttgagcgaatcgatgtacgtggtttcgtcgtattttattttttattttttttagatttttttttttagttttttttgaggcggaaagaaaaattttatatttggttttagttttgggtttttgttttggtttttttt

SEQ ID NO: 40 - DNA, 300 bp, synthetic construct
  source 1..300: mol_type = other DNA
  modified_base 9..10: mod_base = OTHER; note = uracil
  modified_base 15: mod_base = OTHER; note = uracil
  modified_base 21..23: mod_base = OTHER; note = uracil
  modified_base 28: mod_base = OTHER; note = uracil
  modified_base 34..35: mod_base = OTHER; note = uracil
  modified_base 51: mod_base = OTHER; note = uracil
  modified_base 55: mod_base = OTHER; note = uracil
  modified_base 58..59: mod_base = OTHER; note = uracil
  modified_base 61: mod_base = OTHER; note = uracil
  modified_base 70: mod_base = OTHER; note = uracil
  modified_base 84: mod_base = OTHER; note = uracil
  modified_base 116..117: mod_base = OTHER; note = uracil
  modified_base 123: mod_base = OTHER; note = uracil
  modified_base 133: mod_base = OTHER; note = uracil
  modified_base 135: mod_base = OTHER; note = uracil
  modified_base 140..141: mod_base = OTHER; note = uracil
  modified_base 143: mod_base = OTHER; note = uracil
  modified_base 148: mod_base = OTHER; note = uracil
  modified_base 155..160: mod_base = OTHER; note = uracil
  modified_base 170: mod_base = OTHER; note = uracil
  modified_base 174: mod_base = OTHER; note = uracil
  modified_base 185..186: mod_base = OTHER; note = uracil
  modified_base 192: mod_base = OTHER; note = uracil
  modified_base 194..195: mod_base = OTHER; note = uracil
  modified_base 199: mod_base = OTHER; note = uracil
  modified_base 201: mod_base = OTHER; note = uracil
  modified_base 204: mod_base = OTHER; note = uracil
  modified_base 207..208: mod_base = OTHER; note = uracil
  modified_base 211..212: mod_base = OTHER; note = uracil
  modified_base 216: mod_base = OTHER; note = uracil
  modified_base 221: mod_base = OTHER; note = uracil
  modified_base 223..224: mod_base = OTHER; note = uracil
  modified_base 226: mod_base = OTHER; note = uracil
  modified_base 235: mod_base = OTHER; note = uracil
  modified_base 239..240: mod_base = OTHER; note = uracil
  modified_base 247..249: mod_base = OTHER; note = uracil
  modified_base 253..254: mod_base = OTHER; note = uracil
  modified_base 258..260: mod_base = OTHER; note = uracil
  modified_base 266: mod_base = OTHER; note = uracil
  modified_base 268..270: mod_base = OTHER; note = uracil
  modified_base 273..274: mod_base = OTHER; note = uracil
  modified_base 278..279: mod_base = OTHER; note = uracil
  modified_base 281: mod_base = OTHER; note = uracil
  modified_base 287: mod_base = OTHER; note = uracil
  modified_base 293: mod_base = OTHER; note = uracil
  modified_base 295: mod_base = OTHER; note = uracil
  modified_base 299: mod_base = OTHER; note = uracil
  modified_base 56: mod_base = m5c
  modified_base 108: mod_base = m5c
  modified_base 111: mod_base = m5c
  modified_base 119: mod_base = m5c
  modified_base 126: mod_base = m5c
  modified_base 131: mod_base = m5c
  modified_base 144: mod_base = m5c
  modified_base 161: mod_base = m5c
  modified_base 163: mod_base = m5c
  modified_base 175: mod_base = m5c
  modified_base 180: mod_base = m5c
  modified_base 209: mod_base = m5c
  modified_base 219: mod_base = m5c
  modified_base 229: mod_base = m5c
  modified_base 236: mod_base = m5c
  modified_base 242: mod_base = m5c
  modified_base 261: mod_base = m5c
  modified_base 271: mod_base = m5c
  modified_base 282: mod_base = m5c
  modified_base 296: mod_base = m5c
  variation 149: note = CpG site, residue is C if methylated or T(=U) if unmethylated
aggaggggttagggtagggatttagggttgggattagatgtagggttttttttttcgttttagaaggagttgggagggagagtttggggagggtgggggatgggatgcggcggggttacgtgtatcggttcgtttagggttatcgggtygaaggttttttcgcgttggataggtcgggacggtttttttggttttaattattgtatttcgttaggtttcgtttttttgcggttttcggtttcgggttttaggtttgttttcgaggtttttcgtttgattttcgtttttgttttttcgttt

SEQ ID NO: 41 - DNA, 300 bp, synthetic construct
  source 1..300: mol_type = other DNA
  modified_base 2: mod_base = OTHER; note = uracil
  modified_base 6..8: mod_base = OTHER; note = uracil
  modified_base 16: mod_base = OTHER; note = uracil
  modified_base 22: mod_base = OTHER; note = uracil
  modified_base 34: mod_base = OTHER; note = uracil
  modified_base 37: mod_base = OTHER; note = uracil
  modified_base 40..41: mod_base = OTHER; note = uracil
  modified_base 50: mod_base = OTHER; note = uracil
  modified_base 58: mod_base = OTHER; note = uracil
  modified_base 65: mod_base = OTHER; note = uracil
  modified_base 67: mod_base = OTHER; note = uracil
  modified_base 77: mod_base = OTHER; note = uracil
  modified_base 79: mod_base = OTHER; note = uracil
  modified_base 89: mod_base = OTHER; note = uracil
  modified_base 96: mod_base = OTHER; note = uracil
  modified_base 99: mod_base = OTHER; note = uracil
  modified_base 101: mod_base = OTHER; note = uracil
  modified_base 106: mod_base = OTHER; note = uracil
  modified_base 111..112: mod_base = OTHER; note = uracil
  modified_base 117..118: mod_base = OTHER; note = uracil
  modified_base 122: mod_base = OTHER; note = uracil
  modified_base 128: mod_base = OTHER; note = uracil
  modified_base 130: mod_base = OTHER; note = uracil
  modified_base 132: mod_base = OTHER; note = uracil
  modified_base 134: mod_base = OTHER; note = uracil
  modified_base 137: mod_base = OTHER; note = uracil
  modified_base 140: mod_base = OTHER; note = uracil
  modified_base 147: mod_base = OTHER; note = uracil
  modified_base 153: mod_base = OTHER; note = uracil
  modified_base 156: mod_base = OTHER; note = uracil
  modified_base 158: mod_base = OTHER; note = uracil
  modified_base 166: mod_base = OTHER; note = uracil
  modified_base 174: mod_base = OTHER; note = uracil
  modified_base 178: mod_base = OTHER; note = uracil
  modified_base 180: mod_base = OTHER; note = uracil
  modified_base 182: mod_base = OTHER; note = uracil
  modified_base 186: mod_base = OTHER; note = uracil
  modified_base 189..190: mod_base = OTHER; note = uracil
  modified_base 192: mod_base = OTHER; note = uracil
  modified_base 195..197: mod_base = OTHER; note = uracil
  modified_base 201..203: mod_base = OTHER; note = uracil
  modified_base 209..210: mod_base = OTHER; note = uracil
  modified_base 213..214: mod_base = OTHER; note = uracil
  modified_base 217: mod_base = OTHER; note = uracil
  modified_base 219: mod_base = OTHER; note = uracil
  modified_base 225..226: mod_base = OTHER; note = uracil
  modified_base 228..229: mod_base = OTHER; note = uracil
  modified_base 231..232: mod_base = OTHER; note = uracil
  modified_base 234: mod_base = OTHER; note = uracil
  modified_base 237: mod_base = OTHER; note = uracil
  modified_base 243: mod_base = OTHER; note = uracil
  modified_base 247..248: mod_base = OTHER; note = uracil
  modified_base 257: mod_base = OTHER; note = uracil
  modified_base 261..262: mod_base = OTHER; note = uracil
  modified_base 270: mod_base = OTHER; note = uracil
  modified_base 272: mod_base = OTHER; note = uracil
  modified_base 285..287: mod_base = OTHER; note = uracil
  modified_base 289: mod_base = OTHER; note = uracil
  modified_base 291..292: mod_base = OTHER; note = uracil
  modified_base 295: mod_base = OTHER; note = uracil
  modified_base 297: mod_base = OTHER; note = uracil
  modified_base 299..300: mod_base = OTHER; note = uracil
  modified_base 27: mod_base = m5c
  modified_base 93: mod_base = m5c
  modified_base 123: mod_base = m5c
  modified_base 244: mod_base = m5c
  modified_base 266: mod_base = m5c
  variation 149: note = CpG site, residue is C if methylated or T(=U) if unmethylated
ttaaatttaggtattttgggtttagtcggtgtttttttgttaaagagtattttgtggttaaatttattggatgtgatttagtttttatttttcgttattttttagttttgttttatttaaatcggattatttttttttgtttagaattygttttgtttttggtgatagtggtatatatttttatattgtttttttttttgtttagagttttttttttttatgttttattttttttattgggatcggtttgggtgtgttgtttaatcggatattattttgttgggtttttttttttatttt

SEQ ID NO: 42 - DNA, 300 bp, synthetic construct
  source 1..300: mol_type = other DNA
  modified_base 16..18: mod_base = OTHER; note = uracil
  modified_base 21: mod_base = OTHER; note = uracil
  modified_base 32: mod_base = OTHER; note = uracil
  modified_base 41: mod_base = OTHER; note = uracil
  modified_base 44: mod_base = OTHER; note = uracil
  modified_base 46: mod_base = OTHER; note = uracil
  modified_base 48..50: mod_base = OTHER; note = uracil
  modified_base 54: mod_base = OTHER; note = uracil
  modified_base 59..61: mod_base = OTHER; note = uracil
  modified_base 78: mod_base = OTHER; note = uracil
  modified_base 93: mod_base = OTHER; note = uracil
  modified_base 95: mod_base = OTHER; note = uracil
  modified_base 100: mod_base = OTHER; note = uracil
  modified_base 112: mod_base = OTHER; note = uracil
  modified_base 129..130: mod_base = OTHER; note = uracil
  modified_base 132: mod_base = OTHER; note = uracil
  modified_base 136: mod_base = OTHER; note = uracil
  modified_base 138..139: mod_base = OTHER; note = uracil
  modified_base 145: mod_base = OTHER; note = uracil
  modified_base 156: mod_base = OTHER; note = uracil
  modified_base 161: mod_base = OTHER; note = uracil
  modified_base 175: mod_base = OTHER; note = uracil
  modified_base 190: mod_base = OTHER; note = uracil
  modified_base 195: mod_base = OTHER; note = uracil
  modified_base 219: mod_base = OTHER; note = uracil
  modified_base 225: mod_base = OTHER; note = uracil
  modified_base 227: mod_base = OTHER; note = uracil
  modified_base 230..231: mod_base = OTHER; note = uracil
  modified_base 243..244: mod_base = OTHER; note = uracil
  modified_base 246: mod_base = OTHER; note = uracil
  modified_base 253: mod_base = OTHER; note = uracil
  modified_base 255: mod_base = OTHER; note = uracil
  modified_base 261: mod_base = OTHER; note = uracil
  modified_base 269: mod_base = OTHER; note = uracil
  modified_base 271: mod_base = OTHER; note = uracil
  modified_base 275: mod_base = OTHER; note = uracil
  modified_base 280..282: mod_base = OTHER; note = uracil
  modified_base 289..290: mod_base = OTHER; note = uracil
  modified_base 300: mod_base = OTHER; note = uracil
  modified_base 33: mod_base = m5c
  modified_base 55: mod_base = m5c
  modified_base 176: mod_base = m5c
  modified_base 206: mod_base = m5c
  modified_base 272: mod_base = m5c
  variation 150: note = CpG site, residue is C if methylated or T(=U) if unmethylated
gagtgaaggagagggtttaataaaatagtgttcgattggatagtatatttaggtcggttttagtagaggaggtggaatatgagaaggaaggattttgggtaagggaagaggtagtatgagagtatgtattattgttattaagagtagaaygagttttaagtagaagagagtgattcggtttggataaggtaaagttaagagatgacgaaagataaaaattgagttatatttagtgaatttagttataaagtattttttggtagaagaatatcgattagatttagaatatttgggtttgat

SEQ ID NO: 43 - DNA, 300 bp, synthetic construct
  source 1..300: mol_type = other DNA
  modified_base 7: mod_base = OTHER; note = uracil
  modified_base 12..13: mod_base = OTHER; note = uracil
  modified_base 15..16: mod_base = OTHER; note = uracil
  modified_base 26..28: mod_base = OTHER; note = uracil
  modified_base 33: mod_base = OTHER; note = uracil
  modified_base 40: mod_base = OTHER; note = uracil
  modified_base 47: mod_base = OTHER; note = uracil
  modified_base 51: mod_base = OTHER; note = uracil
  modified_base 59: mod_base = OTHER; note = uracil
  modified_base 74: mod_base = OTHER; note = uracil
  modified_base 76: mod_base = OTHER; note = uracil
  modified_base 78: mod_base = OTHER; note = uracil
  modified_base 80: mod_base = OTHER; note = uracil
  modified_base 82: mod_base = OTHER; note = uracil
  modified_base 85: mod_base = OTHER; note = uracil
  modified_base 92: mod_base = OTHER; note = uracil
  modified_base 97: mod_base = OTHER; note = uracil
  modified_base 104: mod_base = OTHER; note = uracil
  modified_base 106: mod_base = OTHER; note = uracil
  modified_base 108: mod_base = OTHER; note = uracil
  modified_base 111: mod_base = OTHER; note = uracil
  modified_base 115: mod_base = OTHER; note = uracil
  modified_base 128: mod_base = OTHER; note = uracil
  modified_base 141: mod_base = OTHER; note = uracil
  modified_base 147..148: mod_base = OTHER; note = uracil
  modified_base 179..180: mod_base = OTHER; note = uracil
  modified_base 182: mod_base = OTHER; note = uracil
  modified_base 185: mod_base = OTHER; note = uracil
  modified_base 188..189: mod_base = OTHER; note = uracil
  modified_base 192..195: mod_base = OTHER; note = uracil
  modified_base 206..207: mod_base = OTHER; note = uracil
  modified_base 211: mod_base = OTHER; note = uracil
  modified_base 219: mod_base = OTHER; note = uracil
  modified_base 230..231: mod_base = OTHER; note = uracil
  modified_base 253: mod_base = OTHER; note = uracil
  modified_base 266: mod_base = OTHER; note = uracil
  modified_base 272: mod_base = OTHER; note = uracil
  modified_base 275..276: mod_base = OTHER; note = uracil
  modified_base 292: mod_base = OTHER; note = uracil
  modified_base 296..299: mod_base = OTHER; note = uracil
  modified_base 23: mod_base = m5c
  modified_base 61: mod_base = m5c
  modified_base 129: mod_base = m5c
  modified_base 251: mod_base = m5c
  modified_base 255: mod_base = m5c
  variation 151: note = CpG site, residue is C if methylated or T(=U) if unmethylated
aagtgtttttattttttgagtgcgatttaagttaggaggtaggaggttgattgagggatacggaggaggtatgtatatttatagtatgaggtagagttgtgtgtatatattaagtaaggaaatggggtcggaatatggggtaaaggtttayggattgaatggtggatttggatgtgggttattttttttagtttttgaaagaggattaggtaatgtggttatgaatgggtttaatgagaattgattgattcgttcgagatgttttttttttttttttaaaatagaaaatgatatatttta

SEQ ID NO: 44 - DNA, 300 bp, synthetic construct
  source 1..300: mol_type = other DNA
  modified_base 11: mod_base = OTHER; note = uracil
  modified_base 17: mod_base = OTHER; note = uracil
  modified_base 40: mod_base = OTHER; note = uracil
  modified_base 43: mod_base = OTHER; note = uracil
  modified_base 54: mod_base = OTHER; note = uracil
  modified_base 58: mod_base = OTHER; note = uracil
  modified_base 63: mod_base = OTHER; note = uracil
  modified_base 65: mod_base = OTHER; note = uracil
  modified_base 72..74: mod_base = OTHER; note = uracil
  modified_base 78: mod_base = OTHER; note = uracil
  modified_base 83..84: mod_base = OTHER; note = uracil
  modified_base 86: mod_base = OTHER; note = uracil
  modified_base 91..92: mod_base = OTHER; note = uracil
  modified_base 97..98: mod_base = OTHER; note = uracil
  modified_base 100: mod_base = OTHER; note = uracil
  modified_base 104: mod_base = OTHER; note = uracil
  modified_base 110: mod_base = OTHER; note = uracil
  modified_base 123..125: mod_base = OTHER; note = uracil
  modified_base 127: mod_base = OTHER; note = uracil
  modified_base 130..131: mod_base = OTHER; note = uracil
  modified_base 136..137: mod_base = OTHER; note = uracil
  modified_base 139..140: mod_base = OTHER; note = uracil
  modified_base 144: mod_base = OTHER; note = uracil
  modified_base 148: mod_base = OTHER; note = uracil
  modified_base 155..156: mod_base = OTHER; note = uracil
  modified_base 161..164: mod_base = OTHER; note = uracil
  modified_base 170: mod_base = OTHER; note = uracil
  modified_base 174..177: mod_base = OTHER; note = uracil
  modified_base 182..183: mod_base = OTHER; note = uracil
  modified_base 187: mod_base = OTHER; note = uracil
  modified_base 198: mod_base = OTHER; note = uracil
  modified_base 200: mod_base = OTHER; note = uracil
  modified_base 202: mod_base = OTHER; note = uracil
  modified_base 205: mod_base = OTHER; note = uracil
  modified_base 207: mod_base = OTHER; note = uracil
  modified_base 210..211: mod_base = OTHER; note = uracil
  modified_base 213: mod_base = OTHER; note = uracil
  modified_base 217: mod_base = OTHER; note = uracil
  modified_base 228: mod_base = OTHER; note = uracil
  modified_base 232..233: mod_base = OTHER; note = uracil
  modified_base 235..236: mod_base = OTHER; note = uracil
  modified_base 238: mod_base = OTHER; note = uracil
  modified_base 244..246: mod_base = OTHER; note = uracil
  modified_base 248: mod_base = OTHER; note = uracil
  modified_base 252: mod_base = OTHER; note = uracil
  modified_base 255..256: mod_base = OTHER; note = uracil
  modified_base 258..259: mod_base = OTHER; note = uracil
  modified_base 262..263: mod_base = OTHER; note = uracil
  modified_base 265..266: mod_base = OTHER; note = uracil
  modified_base 270: mod_base = OTHER; note = uracil
  modified_base 279: mod_base = OTHER; note = uracil
  modified_base 281: mod_base = OTHER; note = uracil
  modified_base 283: mod_base = OTHER; note = uracil
  modified_base 296: mod_base = OTHER; note = uracil
  modified_base 298: mod_base = OTHER; note = uracil
  modified_base 45: mod_base = m5c
  modified_base 49: mod_base = m5c
  modified_base 171: mod_base = m5c
  modified_base 239: mod_base = m5c
  modified_base 277: mod_base = m5c
  variation 149: note = CpG site, residue is C if methylated or T(=U) if unmethylated
tggggtatgttattttttattttaggaagaaaaagaaaatatttcgagcgaattaattaatttttattaggtttatttatagttatattgtttggtttttttttaggggttggaagaagtggtttatatttaaatttattatttaattygtaggtttttgttttatatttcggttttatttttttgtttgatgtgtgtatatagttttgttttatgttgtgagtgtgtatatttttttcgtgttttttagttagttttttgttttttgatttgggtcgtatttaggaggtaaagatattt

SEQ ID NO: 45 - DNA, 300 bp, synthetic construct
  source 1..300: mol_type = other DNA
  modified_base 8: mod_base = OTHER; note = uracil
  modified_base 10: mod_base = OTHER; note = uracil
  modified_base 14: mod_base = OTHER; note = uracil
  modified_base 16..17: mod_base = OTHER; note = uracil
  modified_base 22..23: mod_base = OTHER; note = uracil
  modified_base 25: mod_base = OTHER; note = uracil
  modified_base 27..29: mod_base = OTHER; note = uracil
  modified_base 32: mod_base = OTHER; note = uracil
  modified_base 38: mod_base = OTHER; note = uracil
  modified_base 40: mod_base = OTHER; note = uracil
  modified_base 45: mod_base = OTHER; note = uracil
  modified_base 47: mod_base = OTHER; note = uracil
  modified_base 50..52: mod_base = OTHER; note = uracil
  modified_base 56: mod_base = OTHER; note = uracil
  modified_base 66: mod_base = OTHER; note = uracil
  modified_base 82: mod_base = OTHER; note = uracil
  modified_base 84: mod_base = OTHER; note = uracil
  modified_base 87: mod_base = OTHER; note = uracil
  modified_base 94: mod_base = OTHER; note = uracil
  modified_base 98: mod_base = OTHER; note = uracil
  modified_base 101: mod_base = OTHER; note = uracil
  modified_base 104: mod_base = OTHER; note = uracil
  modified_base 114: mod_base = OTHER; note = uracil
  modified_base 118..119: mod_base = OTHER; note = uracil
  modified_base 121: mod_base = OTHER; note = uracil
  modified_base 125: mod_base = OTHER; note = uracil
  modified_base 127..128: mod_base = OTHER; note = uracil
  modified_base 133..134: mod_base = OTHER; note = uracil
  modified_base 136..137: mod_base = OTHER; note = uracil
  modified_base 140: mod_base = OTHER; note = uracil
  modified_base 143: mod_base = OTHER; note = uracil
  modified_base 145: mod_base = OTHER; note = uracil
  modified_base 149: mod_base = OTHER; note = uracil
  modified_base 152: mod_base = OTHER; note = uracil
  modified_base 154..157: mod_base = OTHER; note = uracil
  modified_base 161: mod_base = OTHER; note = uracil
  modified_base 163..164: mod_base = OTHER; note = uracil
  modified_base 169..170: mod_base = OTHER; note = uracil
  modified_base 173: mod_base = OTHER; note = uracil
  modified_base 177: mod_base = OTHER; note = uracil
  modified_base 181..182: mod_base = OTHER; note = uracil
  modified_base 185: mod_base = OTHER; note = uracil
  modified_base 190..191: mod_base = OTHER; note = uracil
  modified_base 193..194: mod_base = OTHER; note = uracil
  modified_base 196..197: mod_base = OTHER; note = uracil
  modified_base 199: mod_base = OTHER; note = uracil
  modified_base 204: mod_base = OTHER; note = uracil
  modified_base 208..209: mod_base = OTHER; note = uracil
  modified_base 211..212: mod_base = OTHER; note = uracil
  modified_base 215: mod_base = OTHER; note = uracil
  modified_base 228..229: mod_base = OTHER; note = uracil
  modified_base 232: mod_base = OTHER; note = uracil
  modified_base 242: mod_base = OTHER; note = uracil
  modified_base 246: mod_base = OTHER; note = uracil
  modified_base 259: mod_base = OTHER; note = uracil
  modified_base 283: mod_base = OTHER; note = uracil
  modified_base 289: mod_base = OTHER; note = uracil
  modified_base 291: mod_base = OTHER; note = uracil
  modified_base 293: mod_base = OTHER; note = uracil
  modified_base 298: mod_base = OTHER; note = uracil
  modified_base 300: mod_base = OTHER; note = uracil
  modified_base 96: mod_base = m5c
  modified_base 129: mod_base = m5c
  modified_base 146: mod_base = m5c
  modified_base 165: mod_base = m5c
  modified_base 175: mod_base = m5c
  modified_base 233: mod_base = m5c
  modified_base 240: mod_base = m5c
  modified_base 264: mod_base = m5c
  variation 150: note = CpG site, residue is C if methylated or T(=U) if unmethylated
ggatgtgtttaggttttagggttatattttgtatgtatttatagtatagtttattttggaaggtgtagtagagtttgggggtatagttgtgtgttcgtagtagttggaagtttttgattttattttttcggtttattagtagtttcgttygttttttatatattcggattagtacgtagttttgtatgtttttttttatatagtaggttattagtttgttggtgatgttattcgtgaagcgttagtatggggagaggatagtgcgtgggtgggtgggtggggtaggatttttttggtttt

SEQ ID NO: 46 - DNA, 300 bp, synthetic construct
  source 1..300: mol_type = other DNA
  modified_base 5..6: mod_base = OTHER; note = uracil
  modified_base 15..16: mod_base = OTHER; note = uracil
  modified_base 19..22: mod_base = OTHER; note = uracil
  modified_base 24..26: mod_base = OTHER; note = uracil
  modified_base 28..30: mod_base = OTHER; note = uracil
  modified_base 32..34: mod_base = OTHER; note = uracil
  modified_base 38: mod_base = OTHER; note = uracil
  modified_base 40: mod_base = OTHER; note = uracil
  modified_base 44..45: mod_base = OTHER; note = uracil
  modified_base 47: mod_base = OTHER; note = uracil
  modified_base 49..52: mod_base = OTHER; note = uracil
  modified_base 56: mod_base = OTHER; note = uracil
  modified_base 62: mod_base = OTHER; note = uracil
  modified_base 65: mod_base = OTHER; note = uracil
  modified_base 74: mod_base = OTHER; note = uracil
  modified_base 77: mod_base = OTHER; note = uracil
  modified_base 79..80: mod_base = OTHER; note = uracil
  modified_base 83: mod_base = OTHER; note = uracil
  modified_base 87: mod_base = OTHER; note = uracil
  modified_base 94..95: mod_base = OTHER; note = uracil
  modified_base 98: mod_base = OTHER; note = uracil
  modified_base 113: mod_base = OTHER; note = uracil
  modified_base 117: mod_base = OTHER; note = uracil
  modified_base 122: mod_base = OTHER; note = uracil
  modified_base 129: mod_base = OTHER; note = uracil
  modified_base 134: mod_base = OTHER; note = uracil
  modified_base 159: mod_base = OTHER; note = uracil
  modified_base 162: mod_base = OTHER; note = uracil
  modified_base 170: mod_base = OTHER; note = uracil
  modified_base 185: mod_base = OTHER; note = uracil
  modified_base 191: mod_base = OTHER; note = uracil
  modified_base 194..195: mod_base = OTHER; note = uracil
  modified_base 198: mod_base = OTHER; note = uracil
  modified_base 201: mod_base = OTHER; note = uracil
  modified_base 208: mod_base = OTHER; note = uracil
  modified_base 210: mod_base = OTHER; note = uracil
  modified_base 212: mod_base = OTHER; note = uracil
  modified_base 215: mod_base = OTHER; note = uracil
  modified_base 220..224: mod_base = OTHER; note = uracil
  modified_base 228: mod_base = OTHER; note = uracil
  modified_base 230: mod_base = OTHER; note = uracil
  modified_base 233: mod_base = OTHER; note = uracil
  modified_base 236: mod_base = OTHER; note = uracil
  modified_base 238..239: mod_base = OTHER; note = uracil
  modified_base 242..243: mod_base = OTHER; note = uracil
  modified_base 252: mod_base = OTHER; note = uracil
  modified_base 257: mod_base = OTHER; note = uracil
  modified_base 266: mod_base = OTHER; note = uracil
  modified_base 270: mod_base = OTHER; note = uracil
  modified_base 280..282: mod_base = OTHER; note = uracil
  modified_base 288..289: mod_base = OTHER; note = uracil
  modified_base 294: mod_base = OTHER; note = uracil
  modified_base 296: mod_base = OTHER; note = uracil
  modified_base 299..300: mod_base = OTHER; note = uracil
  modified_base 36: mod_base = m5c
  modified_base 60: mod_base = m5c
  modified_base 67: mod_base = m5c
  modified_base 125: mod_base = m5c
  modified_base 135: mod_base = m5c
  modified_base 154: mod_base = m5c
  modified_base 171: mod_base = m5c
  modified_base 204: mod_base = m5c
  variation 150: note = CpG site, residue is C if methylated or T(=U) if unmethylated
gagattagagagattttgttttatttatttatttacgtattgttttttttttatgttagcgttttacggatggtattattaataagttggtggtttgttatgtggaggaggatatgtaggattgcgtgttggttcgggtgtatggggagyggacggagttgttggtggatcgggagaatgaggttagaaatttttagttgttgcgagtatatagttgtgtttttaaattttattgtattttttagaatgggttgtgttatgagtatatgtagggtgtggttttggagtttgagtatattt

SEQ ID NO: 47 - DNA, 301 bp, synthetic construct
  source 1..301: mol_type = other DNA
  modified_base 3..4: mod_base = OTHER; note = uracil
  modified_base 13: mod_base = OTHER; note = uracil
  modified_base 16: mod_base = OTHER; note = uracil
  modified_base 18: mod_base = OTHER; note = uracil
  modified_base 21..24: mod_base = OTHER; note = uracil
  modified_base 31: mod_base = OTHER; note = uracil
  modified_base 36: mod_base = OTHER; note = uracil
  modified_base 40: mod_base = OTHER; note = uracil
  modified_base 47..48: mod_base = OTHER; note = uracil
  modified_base 52: mod_base = OTHER; note = uracil
  modified_base 55: mod_base = OTHER; note = uracil
  modified_base 61: mod_base = OTHER; note = uracil
  modified_base 66: mod_base = OTHER; note = uracil
  modified_base 68: mod_base = OTHER; note = uracil
  modified_base 72: mod_base = OTHER; note = uracil
  modified_base 75..78: mod_base = OTHER; note = uracil
  modified_base 80..83: mod_base = OTHER; note = uracil
  modified_base 86: mod_base = OTHER; note = uracil
  modified_base 90: mod_base = OTHER; note = uracil
  modified_base 94: mod_base = OTHER; note = uracil
  modified_base 120: mod_base = OTHER; note = uracil
  modified_base 127: mod_base = OTHER; note = uracil
  modified_base 131: mod_base = OTHER; note = uracil
  modified_base 133: mod_base = OTHER; note = uracil
  modified_base 135..136: mod_base = OTHER; note = uracil
  modified_base 138: mod_base = OTHER; note = uracil
  modified_base 145..146: mod_base = OTHER; note = uracil
  modified_base 148: mod_base = OTHER; note = uracil
  modified_base 153: mod_base = OTHER; note = uracil
  modified_base 155..157: mod_base = OTHER; note = uracil
  modified_base 159: mod_base = OTHER; note = uracil
  modified_base 161: mod_base = OTHER; note = uracil
  modified_base 163..164: mod_base = OTHER; note = uracil
  modified_base 166..167: mod_base = OTHER; note = uracil
  modified_base 169: mod_base = OTHER; note = uracil
  modified_base 178: mod_base = OTHER; note = uracil
  modified_base 184: mod_base = OTHER; note = uracil
  modified_base 195: mod_base = OTHER; note = uracil
  modified_base 202..204: mod_base = OTHER; note = uracil
  modified_base 208..209: mod_base = OTHER; note = uracil
  modified_base 211..212: mod_base = OTHER; note = uracil
  modified_base 219: mod_base = OTHER; note = uracil
  modified_base 221..222: mod_base = OTHER; note = uracil
  modified_base 225: mod_base = OTHER; note = uracil
  modified_base 231: mod_base = OTHER; note = uracil
  modified_base 237..238: mod_base = OTHER; note = uracil
  modified_base 241: mod_base = OTHER; note = uracil
  modified_base 260: mod_base = OTHER; note = uracil
  modified_base 262..263: mod_base = OTHER; note = uracil
  modified_base 266: mod_base = OTHER; note = uracil
  modified_base 270: mod_base = OTHER; note = uracil
  modified_base 272..273: mod_base = OTHER; note = uracil
  modified_base 278..280: mod_base = OTHER; note = uracil
  modified_base 285: mod_base = OTHER; note = uracil
  modified_base 288..289: mod_base = OTHER; note = uracil
  modified_base 292: mod_base = OTHER; note = uracil
  modified_base 296: mod_base = OTHER; note = uracil
  modified_base 301: mod_base = OTHER; note = uracil
  modified_base 34: mod_base = m5c
  modified_base 44: mod_base = m5c
  modified_base 59: mod_base = m5c
  modified_base 100: mod_base = m5c
  modified_base 113: mod_base = m5c
  modified_base 139: mod_base = m5c
  modified_base 274: mod_base = m5c
  variation 150: note = CpG site, residue is C if methylated or T(=U) if unmethylated
  variation 264: note = CpG site, residue is C if methylated or T(=U) if unmethylated
agttaggaagggttgtatttttttagtggttagcgtaggttggcgttttggttgttggcgtaagttttaagttgtttttttttttttagtaagtatgggcggtgtgggtatgcggggtgttgggtattgatttattttcggagattattyggtttttatatattatttttgaatgatttgaattatttatgaggttgaatgttttgttttttagggagttttagttggagttggagttagtatatggaggtggagagagttttygtagttattcgggttttgtatagtttgtaggtagaat

SEQ ID NO: 48 - DNA, 301 bp, synthetic construct
  source 1..301: mol_type = other DNA
  modified_base 4: mod_base = OTHER; note = uracil
  modified_base 7..8: mod_base = OTHER; note = uracil
  modified_base 11: mod_base = OTHER; note = uracil
  modified_base 15: mod_base = OTHER; note = uracil
  modified_base 20: mod_base = OTHER; note = uracil
  modified_base 25..26: mod_base = OTHER; note = uracil
  modified_base 34: mod_base = OTHER; note = uracil
  modified_base 43: mod_base = OTHER; note = uracil
  modified_base 45: mod_base = OTHER; note = uracil
  modified_base 47: mod_base = OTHER; note = uracil
  modified_base 49..50: mod_base = OTHER; note = uracil
  modified_base 52..53: mod_base = OTHER; note = uracil
  modified_base 55..56: mod_base = OTHER; note = uracil
  modified_base 62: mod_base = OTHER; note = uracil
  modified_base 66: mod_base = OTHER; note = uracil
  modified_base 68..69: mod_base = OTHER; note = uracil
  modified_base 72: mod_base = OTHER; note = uracil
  modified_base 74..75: mod_base = OTHER; note = uracil
  modified_base 78: mod_base = OTHER; note = uracil
  modified_base 84: mod_base = OTHER; note = uracil
  modified_base 86..88: mod_base = OTHER; note = uracil
  modified_base 96: mod_base = OTHER; note = uracil
  modified_base 101: mod_base = OTHER; note = uracil
  modified_base 105: mod_base = OTHER; note = uracil
  modified_base 108..109: mod_base = OTHER; note = uracil
  modified_base 111: mod_base = OTHER; note = uracil
  modified_base 122: mod_base = OTHER; note = uracil
  modified_base 127: mod_base = OTHER; note = uracil
  modified_base 131: mod_base = OTHER; note = uracil
  modified_base 150: mod_base = OTHER; note = uracil
  modified_base 159: mod_base = OTHER; note = uracil
  modified_base 161: mod_base = OTHER; note = uracil
  modified_base 173: mod_base = OTHER; note = uracil
  modified_base 178..180: mod_base = OTHER; note = uracil
  modified_base 183: mod_base = OTHER; note = uracil
  modified_base 185..187: mod_base = OTHER; note = uracil
  modified_base 190: mod_base = OTHER; note = uracil
  modified_base 194..196: mod_base = OTHER; note = uracil
  modified_base 198: mod_base = OTHER; note = uracil
  modified_base 200: mod_base = OTHER; note = uracil
  modified_base 203..205: mod_base = OTHER; note = uracil
  modified_base 209: mod_base = OTHER; note = uracil
  modified_base 213: mod_base = OTHER; note = uracil
  modified_base 228: mod_base = OTHER; note = uracil
  modified_base 231: mod_base = OTHER; note = uracil
  modified_base 238: mod_base = OTHER; note = uracil
  modified_base 244..245: mod_base = OTHER; note = uracil
  modified_base 248: mod_base = OTHER; note = uracil
  modified_base 251..252: mod_base = OTHER; note = uracil
  modified_base 259..260: mod_base = OTHER; note = uracil
  modified_base 263..264: mod_base = OTHER; note = uracil
  modified_base 269: mod_base = OTHER; note = uracil
  modified_base 273..274: mod_base = OTHER; note = uracil
  modified_base 276: mod_base = OTHER; note = uracil
  modified_base 287: mod_base = OTHER; note = uracil
  modified_base 290..292: mod_base = OTHER; note = uracil
  modified_base 295..296: mod_base = OTHER; note = uracil
  modified_base 300: mod_base = OTHER; note = uracil
  modified_base 27: mod_base = m5c
  modified_base 162: mod_base = m5c
  modified_base 188: mod_base = m5c
  modified_base 201: mod_base = m5c
  modified_base 242: mod_base = m5c
  modified_base 257: mod_base = m5c
  modified_base 267: mod_base = m5c
  variation 37: note = CpG site, residue is C if methylated or T(=U) if unmethylated
  variation 151: note = CpG site, residue is C if methylated or T(=U) if unmethylated
gttttgtttgtaggttgtatagggttcgggtgattgygggagttttttttatttttatatgttggttttagttttagttggagttttttggaggatagggtatttagttttataaatgatttagattatttagaggtggtgtgtgggagtygagtggttttcggaggtgagttagtatttagtatttcgtatatttatatcgtttatgtttgttagaaggggaggggtagtttgagatttgcgttagtagttaggacgttagtttgcgttgattattggggaagtgtagttttttttggtt

SEQ ID NO: 49 - DNA, 300 bp, synthetic construct
  source 1..300: mol_type = other DNA
  modified_base 6: mod_base = OTHER; note = uracil
  modified_base 13: mod_base = OTHER; note = uracil
  modified_base 17: mod_base = OTHER; note = uracil
  modified_base 19: mod_base = OTHER; note = uracil
  modified_base 21..22: mod_base = OTHER; note = uracil
  modified_base 24: mod_base = OTHER; note = uracil
  modified_base 31..32: mod_base = OTHER; note = uracil
  modified_base 34: mod_base = OTHER; note = uracil
  modified_base 39: mod_base = OTHER; note = uracil
  modified_base 41..43: mod_base = OTHER; note = uracil
  modified_base 45: mod_base = OTHER; note = uracil
  modified_base 47: mod_base = OTHER; note = uracil
  modified_base 49..50: mod_base = OTHER; note = uracil
  modified_base 52..53: mod_base = OTHER; note = uracil
  modified_base 55: mod_base = OTHER; note = uracil
  modified_base 64: mod_base = OTHER; note = uracil
  modified_base 70: mod_base = OTHER; note = uracil
  modified_base 81: mod_base = OTHER; note = uracil
  modified_base 88..90: mod_base = OTHER; note = uracil
  modified_base 94..95: mod_base = OTHER; note = uracil
  modified_base 97..98: mod_base = OTHER; note = uracil
  modified_base 105: mod_base = OTHER; note = uracil
  modified_base 107..108: mod_base = OTHER; note = uracil
  modified_base 111: mod_base = OTHER; note = uracil
  modified_base 117: mod_base = OTHER; note = uracil
  modified_base 123..124: mod_base = OTHER; note = uracil
  modified_base 127: mod_base = OTHER; note = uracil
  modified_base 146: mod_base = OTHER; note = uracil
  modified_base 148..149: mod_base = OTHER; note = uracil
  modified_base 152: mod_base = OTHER; note = uracil
  modified_base 156: mod_base = OTHER; note = uracil
  modified_base 158..159: mod_base = OTHER; note = uracil
  modified_base 164..166: mod_base = OTHER; note = uracil
  modified_base 171: mod_base = OTHER; note = uracil
  modified_base 174..175: mod_base = OTHER; note = uracil
  modified_base 178: mod_base = OTHER; note = uracil
  modified_base 182: mod_base = OTHER; note = uracil
  modified_base 187..188: mod_base = OTHER; note = uracil
  modified_base 195: mod_base = OTHER; note = uracil
  modified_base 200: mod_base = OTHER; note = uracil
  modified_base 202..203: mod_base = OTHER; note = uracil
  modified_base 209..210: mod_base = OTHER; note = uracil
  modified_base 212: mod_base = OTHER; note = uracil
  modified_base 214..215: mod_base = OTHER; note = uracil
  modified_base 217: mod_base = OTHER; note = uracil
  modified_base 219: mod_base = OTHER; note = uracil
  modified_base 224..225: mod_base = OTHER; note = uracil
  modified_base 234: mod_base = OTHER; note = uracil
  modified_base 237: mod_base = OTHER; note = uracil
  modified_base 245: mod_base = OTHER; note = uracil
  modified_base 247: mod_base = OTHER; note = uracil
  modified_base 249: mod_base = OTHER; note = uracil
  modified_base 255: mod_base = OTHER; note = uracil
  modified_base 257: mod_base = OTHER; note = uracil
  modified_base 259: mod_base = OTHER; note = uracil
  modified_base 264: mod_base = OTHER; note = uracil
  modified_base 267: mod_base = OTHER; note = uracil
  modified_base 273: mod_base = OTHER; note = uracil
  modified_base 275: mod_base = OTHER; note = uracil
  modified_base 278: mod_base = OTHER; note = uracil
  modified_base 285: mod_base = OTHER; note = uracil
  modified_base 293..295: mod_base = OTHER; note = uracil
  modified_base 25: mod_base = m5c
  modified_base 160: mod_base = m5c
  variation 36: note = CpG site, residue is C if methylated or T(=U) if unmethylated
  variation 150: note = CpG site, residue is C if methylated or T(=U) if unmethylated
gggtgttgggtattgatttattttcggagattattyggtttttatatattatttttgaatgatttgaattatttatgaggttgaatgttttgttttttagggagttttagttggagttggagttagtatatggaggtggagagagttttygtagttattcgggttttgtatagtttgtaggtagaatttataaattggatttttaaagttattttttttaaggtttggagattttgttgagttttattttttggtttttagagtatttggaattttatataaagttgaggaattttttgt

SEQ ID NO: 50 - DNA, 300 bp, synthetic construct
  source 1..300: mol_type = other DNA
  modified_base 2: mod_base = OTHER; note = uracil
  modified_base 11..12: mod_base = OTHER; note = uracil
  modified_base 14: mod_base = OTHER; note = uracil
  modified_base 17: mod_base = OTHER; note = uracil
  modified_base 31..32: mod_base = OTHER; note = uracil
  modified_base 38: mod_base = OTHER; note = uracil
  modified_base 40: mod_base = OTHER; note = uracil
  modified_base 47..48: mod_base = OTHER; note = uracil
  modified_base 60: mod_base = OTHER; note = uracil
  modified_base 62: mod_base = OTHER; note = uracil
  modified_base 65: mod_base = OTHER; note = uracil
  modified_base 71: mod_base = OTHER; note = uracil
  modified_base 73..74: mod_base = OTHER; note = uracil
  modified_base 78..79: mod_base = OTHER; note = uracil
  modified_base 93: mod_base = OTHER; note = uracil
  modified_base 103..104: mod_base = OTHER; note = uracil
  modified_base 117: mod_base = OTHER; note = uracil
  modified_base 120..121: mod_base = OTHER; note = uracil
  modified_base 124: mod_base = OTHER; note = uracil
  modified_base 128: mod_base = OTHER; note = uracil
  modified_base 133: mod_base = OTHER; note = uracil
  modified_base 138..139: mod_base = OTHER; note = uracil
  modified_base 147: mod_base = OTHER; note = uracil
  modified_base 156: mod_base = OTHER; note = uracil
  modified_base 158: mod_base = OTHER; note = uracil
  modified_base 160: mod_base = OTHER; note = uracil
  modified_base 162..163: mod_base = OTHER; note = uracil
  modified_base 165..166: mod_base = OTHER; note = uracil
  modified_base 168..169: mod_base = OTHER; note = uracil
  modified_base 175: mod_base = OTHER; note = uracil
  modified_base 179: mod_base = OTHER; note = uracil
  modified_base 181..182: mod_base = OTHER; note = uracil
  modified_base 185: mod_base = OTHER; note = uracil
  modified_base 187..188: mod_base = OTHER; note = uracil
  modified_base 191: mod_base = OTHER; note = uracil
  modified_base 197: mod_base = OTHER; note = uracil
  modified_base 199..201: mod_base = OTHER; note = uracil
  modified_base 209: mod_base = OTHER; note = uracil
  modified_base 214: mod_base = OTHER; note = uracil
  modified_base 218: mod_base = OTHER; note = uracil
  modified_base 221..222: mod_base = OTHER; note = uracil
  modified_base 224: mod_base = OTHER; note = uracil
  modified_base 235: mod_base = OTHER; note = uracil
  modified_base 240: mod_base = OTHER; note = uracil
  modified_base 244: mod_base = OTHER; note = uracil
  modified_base 263: mod_base = OTHER; note = uracil
  modified_base 272: mod_base = OTHER; note = uracil
  modified_base 274: mod_base = OTHER; note = uracil
  modified_base 286: mod_base = OTHER; note = uracil
  modified_base 291..293: mod_base = OTHER; note = uracil
  modified_base 296: mod_base = OTHER; note = uracil
  modified_base 298..300: mod_base = OTHER; note = uracil
  modified_base 140: mod_base = m5c
  modified_base 275: mod_base = m5c
  variation 150: note = CpG site, residue is C if methylated or T(=U) if unmethylated
  variation 264: note = CpG site, residue is C if methylated or T(=U) if unmethylated
ataaagggttttttagttttatgtagagttttagatgttttgagagttaaagagtgaaatttagtagaatttttaggttttgagaggagtggttttaggagtttagtttataggttttgtttgtaggttgtatagggttcgggtgattgygggagttttttttatttttatatgttggttttagttttagttggagttttttggaggatagggtatttagttttataaatgatttagattatttagaggtggtgtgtgggagtygagtggttttcggaggtgagttagtatttagtattt

SEQ ID NO: 51 - DNA, 300 bp, synthetic construct
  source 1..300: mol_type = other DNA
  modified_base 4..5: mod_base = OTHER; note = uracil
  modified_base 13: mod_base = OTHER; note = uracil
  modified_base 15: mod_base = OTHER; note = uracil
  modified_base 21: mod_base = OTHER; note = uracil
  modified_base 35: mod_base = OTHER; note = uracil
  modified_base 37..38: mod_base = OTHER; note = uracil
  modified_base 45: mod_base = OTHER; note = uracil
  modified_base 53: mod_base = OTHER; note = uracil
  modified_base 57..58: mod_base = OTHER; note = uracil
  modified_base 62: mod_base = OTHER; note = uracil
  modified_base 64..65: mod_base = OTHER; note = uracil
  modified_base 68: mod_base = OTHER; note = uracil
  modified_base 77: mod_base = OTHER; note = uracil
  modified_base 85..86: mod_base = OTHER; note = uracil
  modified_base 92: mod_base = OTHER; note = uracil
  modified_base 109: mod_base = OTHER; note = uracil
  modified_base 118: mod_base = OTHER; note = uracil
  modified_base 122: mod_base = OTHER; note = uracil
  modified_base 127: mod_base = OTHER; note = uracil
  modified_base 130: mod_base = OTHER; note = uracil
  modified_base 135: mod_base = OTHER; note = uracil
  modified_base 139: mod_base = OTHER; note = uracil
  modified_base 159: mod_base = OTHER; note = uracil
  modified_base 161..162: mod_base = OTHER; note = uracil
  modified_base 164: mod_base = OTHER; note = uracil
  modified_base 171: mod_base = OTHER; note = uracil
  modified_base 180: mod_base = OTHER; note = uracil
  modified_base 187..188: mod_base = OTHER; note = uracil
  modified_base 190: mod_base = OTHER; note = uracil
  modified_base 195..196: mod_base = OTHER; note = uracil
  modified_base 203: mod_base = OTHER; note = uracil
  modified_base 206: mod_base = OTHER; note = uracil
  modified_base 209: mod_base = OTHER; note = uracil
  modified_base 211: mod_base = OTHER; note = uracil
  modified_base 231: mod_base = OTHER; note = uracil
  modified_base 236..237: mod_base = OTHER; note = uracil
  modified_base 239: mod_base = OTHER; note = uracil
  modified_base 246: mod_base = OTHER; note = uracil
  modified_base 249: mod_base = OTHER; note = uracil
  modified_base 253: mod_base = OTHER; note = uracil
  modified_base 257: mod_base = OTHER; note = uracil
  modified_base 259..260: mod_base = OTHER; note = uracil
  modified_base 263: mod_base = OTHER; note = uracil
  modified_base 282: mod_base = OTHER; note = uracil
  modified_base 289..291: mod_base = OTHER; note = uracil
  modified_base 294: mod_base = OTHER; note = uracil
  modified_base 296: mod_base = OTHER; note = uracil
  modified_base 69: mod_base = m5c
  modified_base 71: mod_base = m5c
  modified_base 80: mod_base = m5c
  modified_base 110: mod_base = m5c
  modified_base 113: mod_base = m5c
  modified_base 119: mod_base = m5c
  modified_base 123: mod_base = m5c
  modified_base 125: mod_base = m5c
  modified_base 137: mod_base = m5c
  modified_base 140: mod_base = m5c
  modified_base 153: mod_base = m5c
  modified_base 157: mod_base = m5c
  modified_base 178: mod_base = m5c
  modified_base 181: mod_base = m5c
  modified_base 207: mod_base = m5c
  modified_base 212: mod_base = m5c
  modified_base 215: mod_base = m5c
  modified_base 222: mod_base = m5c
  modified_base 224: mod_base = m5c
  modified_base 270: mod_base = m5c
  modified_base 275: mod_base = m5c
  modified_base 277: mod_base = m5c
  modified_base 280: mod_base = m5c
  modified_base 283: mod_base = m5c
  modified_base 297: mod_base = m5c
  variation 151: note = CpG site, residue is C if methylated or T(=U) if unmethylated
agtttatgaaggtatttttttaaagttaggtggttattaaaaaataggtaattaattttgttattagtcgcggggatagcgaggttttgggtttggagggggaggatgtcgacgatgtcgatcgcgtattagatttcgtcgggaggagggygcgggcgttttatttgttgtaaagaacgtcgggtttttttgggttattgggttgtcgtttcggcggggagcgcggaaggttgggttttaggtagttttaattatttatttgttggttacgggtcgcggcgtcggggattttatttcgga

SEQ ID NO: 52 - DNA, 300 bp, synthetic construct
  source 1..300: mol_type = other DNA
  modified_base 2: mod_base = OTHER; note = uracil
  modified_base 14..16: mod_base = OTHER; note = uracil
  modified_base 22: mod_base = OTHER; note = uracil
  modified_base 28..29: mod_base = OTHER; note = uracil
  modified_base 35..36: mod_base = OTHER; note = uracil
  modified_base 39: mod_base = OTHER; note = uracil
  modified_base 56: mod_base = OTHER; note = uracil
  modified_base 59..60: mod_base = OTHER; note = uracil
  modified_base 66..68: mod_base = OTHER; note = uracil
  modified_base 71..72: mod_base = OTHER; note = uracil
  modified_base 75: mod_base = OTHER; note = uracil
  modified_base 80: mod_base = OTHER; note = uracil
  modified_base 82..84: mod_base = OTHER; note = uracil
  modified_base 87: mod_base = OTHER; note = uracil
  modified_base 96: mod_base = OTHER; note = uracil
  modified_base 99..101: mod_base = OTHER; note = uracil
  modified_base 107..109: mod_base = OTHER; note = uracil
  modified_base 117..118: mod_base = OTHER; note = uracil
  modified_base 126: mod_base = OTHER; note = uracil
  modified_base 131: mod_base = OTHER; note = uracil
  modified_base 134: mod_base = OTHER; note = uracil
  modified_base 145..146: mod_base = OTHER; note = uracil
  modified_base 151..153: mod_base = OTHER; note = uracil
  modified_base 155..156: mod_base = OTHER; note = uracil
  modified_base 158..159: mod_base = OTHER; note = uracil
  modified_base 169: mod_base = OTHER; note = uracil
  modified_base 184: mod_base = OTHER; note = uracil
  modified_base 193: mod_base = OTHER; note = uracil
  modified_base 196..197: mod_base = OTHER; note = uracil
  modified_base 199..203: mod_base = OTHER; note = uracil
  modified_base 205..206: mod_base = OTHER; note = uracil
  modified_base 210..212: mod_base = OTHER; note = uracil
  modified_base 217..218: mod_base = OTHER; note = uracil
  modified_base 222: mod_base = OTHER; note = uracil
  modified_base 226..228: mod_base = OTHER; note = uracil
  modified_base 234: mod_base = OTHER; note = uracil
  modified_base 241: mod_base = OTHER; note = uracil
  modified_base 253..254: mod_base = OTHER; note = uracil
  modified_base 268..269: mod_base = OTHER; note = uracil
  modified_base 271..272: mod_base = OTHER; note = uracil
  modified_base 276: mod_base = OTHER; note = uracil
  modified_base 289..290: mod_base = OTHER; note = uracil
  modified_base 293: mod_base = OTHER; note = uracil
  modified_base 299: mod_base = OTHER; note = uracil
  modified_base 3: mod_base = m5c
  modified_base 17: mod_base = m5c
  modified_base 20: mod_base = m5c
  modified_base 23: mod_base = m5c
  modified_base 25: mod_base = m5c
  modified_base 30: mod_base = m5c
  modified_base 76: mod_base = m5c
  modified_base 78: mod_base = m5c
  modified_base 85: mod_base = m5c
  modified_base 88: mod_base = m5c
  modified_base 93: mod_base = m5c
  modified_base 119: mod_base = m5c
  modified_base 122: mod_base = m5c
  modified_base 143: mod_base = m5c
  modified_base 147: mod_base = m5c
  modified_base 160: mod_base = m5c
  modified_base 163: mod_base = m5c
  modified_base 175: mod_base = m5c
  modified_base 177: mod_base = m5c
  modified_base 181: mod_base = m5c
  modified_base 187: mod_base = m5c
  modified_base 190: mod_base = m5c
  modified_base 220: mod_base = m5c
  modified_base 229: mod_base = m5c
  modified_base 231: mod_base = m5c
  variation 149: note = CpG site, residue is C if methylated or T(=U) if unmethylated
ttcggagtagggttttcggcgtcgcgattcgtaattagtaggtgaatgattgaagttatttgaggtttagtttttcgcgtttttcgtcggagcggtagtttaatggtttagaggaattcggcgttttttgtaataagtggagcgttcgygtttttttttcggcgagatttgatgcgcggtcggtatcgtcggtattttttttttttaagtttaaggtttcgttgttttcgcggttggtgataggattgattatttgttttttggtgattatttaattttgaaaaagtgtttttatggatt

SEQ ID NO: 53 - DNA, 300 bp, synthetic construct
  source 1..300: mol_type = other DNA
  modified_base 3: mod_base = OTHER; note = uracil
  modified_base 6: mod_base = OTHER; note = uracil
  modified_base 9: mod_base = OTHER; note = uracil
  modified_base 32: mod_base = OTHER; note = uracil
  modified_base 49..50: mod_base = OTHER; note = uracil
  modified_base 70..72: mod_base = OTHER; note = uracil
  modified_base 79: mod_base = OTHER; note = uracil
  modified_base 83: mod_base = OTHER; note = uracil
  modified_base 90..91: mod_base = OTHER; note = uracil
  modified_base 102..103: mod_base = OTHER; note = uracil
  modified_base 111: mod_base = OTHER; note = uracil
  modified_base 114: mod_base = OTHER; note = uracil
  modified_base 117..118: mod_base = OTHER; note = uracil
  modified_base 121: mod_base = OTHER; note = uracil
  modified_base 132: mod_base = OTHER; note = uracil
  modified_base 138: mod_base = OTHER; note = uracil
  modified_base 160..162: mod_base = OTHER; note = uracil
  modified_base 175: mod_base = OTHER; note = uracil
  modified_base 178: mod_base = OTHER; note = uracil
  modified_base 188..189: mod_base = OTHER; note = uracil
  modified_base 197: mod_base = OTHER; note = uracil
  modified_base 199..200: mod_base = OTHER; note = uracil
  modified_base 205: mod_base = OTHER; note = uracil
  modified_base 214: mod_base = OTHER; note = uracil
  modified_base 216: mod_base = OTHER; note = uracil
  modified_base 220: mod_base = OTHER; note = uracil
  modified_base 222: mod_base = OTHER; note = uracil
  modified_base 225: mod_base = OTHER; note = uracil
  modified_base 229: mod_base = OTHER; note = uracil
  modified_base 239: mod_base = OTHER; note = uracil
  modified_base 243: mod_base = OTHER; note = uracil
  modified_base 248..249: mod_base = OTHER; note = uracil
  modified_base 252: mod_base = OTHER; note = uracil
  modified_base 255: mod_base = OTHER; note = uracil
  modified_base 257: mod_base = OTHER; note = uracil
  modified_base 259: mod_base = OTHER; note = uracil
  modified_base 266..267: mod_base = OTHER; note = uracil
  modified_base 272..273: mod_base = OTHER; note = uracil
  modified_base 276..277: mod_base = OTHER; note = uracil
  modified_base 283..287: mod_base = OTHER; note = uracil
  modified_base 294: mod_base = OTHER; note = uracil
  modified_base 84: mod_base = m5c
  modified_base 179: mod_base = m5c
  modified_base 208: mod_base = m5c
  modified_base 245: mod_base = m5c
  modified_base 269: mod_base = m5c
  variation 149: note = CpG site, residue is C if methylated or T(=U) if unmethylated
gtttgtagttgggaatgaatggaatgaaggttaaggatgaagtaataattaaatattgggttttgggtgttttggtaattgttcggtttttagttagggtttttgggtgatattttttttttgggggaagatagagttaaatgagaaaygtgagttgagtttaggggaaaggattattcgggagatgtttgaggggttttagggtatcgtaattttttgtttagttggtagagtggggttgatacggttagttgttttttggagttttcggtttttttgtttttttttgaggattttgag

SEQ ID NO: 54 - DNA, 300 bp, synthetic construct
  source 1..300: mol_type = other DNA
  modified_base 2: mod_base = OTHER; note = uracil
  modified_base 8..9: mod_base = OTHER; note = uracil
  modified_base 11: mod_base = OTHER; note = uracil
  modified_base 21: mod_base = OTHER; note = uracil
  modified_base 29: mod_base = OTHER; note = uracil
  modified_base 36: mod_base = OTHER; note = uracil
  modified_base 38..39: mod_base = OTHER; note = uracil
  modified_base 46: mod_base = OTHER; note = uracil
  modified_base 49: mod_base = OTHER; note = uracil
  modified_base 53: mod_base = OTHER; note = uracil
  modified_base 59: mod_base = OTHER; note = uracil
  modified_base 62..65: mod_base = OTHER; note = uracil
  modified_base 67: mod_base = OTHER; note = uracil
  modified_base 69: mod_base = OTHER; note = uracil
  modified_base 72..73: mod_base = OTHER; note = uracil
  modified_base 76: mod_base = OTHER; note = uracil
  modified_base 81: mod_base = OTHER; note = uracil
  modified_base 96..98: mod_base = OTHER; note = uracil
  modified_base 104..107: mod_base = OTHER; note = uracil
  modified_base 109: mod_base = OTHER; note = uracil
  modified_base 113: mod_base = OTHER; note = uracil
  modified_base 116: mod_base = OTHER; note = uracil
  modified_base 118..119: mod_base = OTHER; note = uracil
  modified_base 128..129: mod_base = OTHER; note = uracil
  modified_base 133..136: mod_base = OTHER; note = uracil
  modified_base 141: mod_base = OTHER; note = uracil
  modified_base 143: mod_base = OTHER; note = uracil
  modified_base 146: mod_base = OTHER; note = uracil
  modified_base 148: mod_base = OTHER; note = uracil
  modified_base 155: mod_base = OTHER; note = uracil
  modified_base 157: mod_base = OTHER; note = uracil
  modified_base 164: mod_base = OTHER; note = uracil
  modified_base 166: mod_base = OTHER; note = uracil
  modified_base 170: mod_base = OTHER; note = uracil
  modified_base 173..177: mod_base = OTHER; note = uracil
  modified_base 191: mod_base = OTHER; note = uracil
  modified_base 193..195: mod_base = OTHER; note = uracil
  modified_base 201..203: mod_base = OTHER; note = uracil
  modified_base 207: mod_base = OTHER; note = uracil
  modified_base 214: mod_base = OTHER; note = uracil
  modified_base 219: mod_base = OTHER; note = uracil
  modified_base 225..226: mod_base = OTHER; note = uracil
  modified_base 231: mod_base = OTHER; note = uracil
  modified_base 233..235: mod_base = OTHER; note = uracil
  modified_base 240..242: mod_base = OTHER; note = uracil
  modified_base 258: mod_base = OTHER; note = uracil
  modified_base 261: mod_base = OTHER; note = uracil
  modified_base 264..265: mod_base = OTHER; note = uracil
  modified_base 270..271: mod_base = OTHER; note = uracil
  modified_base 274: mod_base = OTHER; note = uracil
  modified_base 278..279: mod_base = OTHER; note = uracil
  modified_base 283: mod_base = OTHER; note = uracil
  modified_base 287..289: mod_base = OTHER; note = uracil
  modified_base 292: mod_base = OTHER; note = uracil
  modified_base 295: mod_base = OTHER; note = uracil
  modified_base 299: mod_base = OTHER; note = uracil
  modified_base 30: mod_base = m5c
  modified_base 54: mod_base = m5c
  modified_base 91: mod_base = m5c
  modified_base 120: mod_base = m5c
  modified_base 215: mod_base = m5c
  variation 150: note = CpG site, residue is C if methylated or T(=U) if unmethylated
ttaaagtttttagggggaaataggaaggtcgaggattttagagagtagttggtcgtgttagttttattttgttagttgagtaagagattacgatgttttggagttttttaggtatttttcggatgatttttttttttgggtttaatttaygttttttatttgattttgtttttttttagaaggaagatgttatttaggaattttaattggaaatcggatagttattagggtatttaaaatttaatatttggttattattttatttttgatttttattttatttatttttagttgtagata

SEQ ID NO: 55 - DNA, 300 bp, synthetic construct
  source 1..300: mol_type = other DNA
  modified_base 1..2: mod_base = OTHER; note = uracil
  modified_base 7: mod_base = OTHER; note = uracil
  modified_base 12: mod_base = OTHER; note = uracil
  modified_base 16: mod_base = OTHER; note = uracil
  modified_base 18: mod_base = OTHER; note = uracil
  modified_base 21..23: mod_base = OTHER; note = uracil
  modified_base 25..26: mod_base = OTHER; note = uracil
  modified_base 30: mod_base = OTHER; note = uracil
  modified_base 34..35: mod_base = OTHER; note = uracil
  modified_base 46..48: mod_base = OTHER; note = uracil
  modified_base 50: mod_base = OTHER; note = uracil
  modified_base 52..53: mod_base = OTHER; note = uracil
  modified_base 55: mod_base = OTHER; note = uracil
  modified_base 57: mod_base = OTHER; note = uracil
  modified_base 61..62: mod_base = OTHER; note = uracil
  modified_base 64: mod_base = OTHER; note = uracil
  modified_base 70: mod_base = OTHER; note = uracil
  modified_base 73: mod_base = OTHER; note = uracil
  modified_base 75: mod_base = OTHER; note = uracil
  modified_base 77: mod_base = OTHER; note = uracil
  modified_base 81: mod_base = OTHER; note = uracil
  modified_base 84: mod_base = OTHER; note = uracil
  modified_base 93..94: mod_base = OTHER; note = uracil
  modified_base 96: mod_base = OTHER; note = uracil
  modified_base 105: mod_base = OTHER; note = uracil
  modified_base 113..115: mod_base = OTHER; note = uracil
  modified_base 117..119: mod_base = OTHER; note = uracil
  modified_base 122: mod_base = OTHER; note = uracil
  modified_base 127: mod_base = OTHER; note = uracil
  modified_base 131..132: mod_base = OTHER; note = uracil
  modified_base 134..136: mod_base = OTHER; note = uracil
  modified_base 139: mod_base = OTHER; note = uracil
  modified_base 149..150: mod_base = OTHER; note = uracil
  modified_base 165: mod_base = OTHER; note = uracil
  modified_base 177: mod_base = OTHER; note = uracil
  modified_base 179: mod_base = OTHER; note = uracil
  modified_base 181: mod_base = OTHER; note = uracil
  modified_base 184: mod_base = OTHER; note = uracil
  modified_base 188: mod_base = OTHER; note = uracil
  modified_base 190: mod_base = OTHER; note = uracil
  modified_base 192: mod_base = OTHER; note = uracil
  modified_base 194: mod_base = OTHER; note = uracil
  modified_base 199..200: mod_base = OTHER; note = uracil
  modified_base 203: mod_base = OTHER; note = uracil
  modified_base 207: mod_base = OTHER; note = uracil
  modified_base 210: mod_base = OTHER; note = uracil
  modified_base 212: mod_base = OTHER; note = uracil
  modified_base 225: mod_base = OTHER; note = uracil
  modified_base 235: mod_base = OTHER; note = uracil
  modified_base 239: mod_base = OTHER; note = uracil
  modified_base 259: mod_base = OTHER; note = uracil
  modified_base 261: mod_base = OTHER; note = uracil
  modified_base 263: mod_base = OTHER; note = uracil
  modified_base 269: mod_base = OTHER; note = uracil
  modified_base 272: mod_base = OTHER; note = uracil
  modified_base 291..293: mod_base = OTHER; note = uracil
  modified_base 140: mod_base = m5c
  modified_base 156: mod_base = m5c
  modified_base 253: mod_base = m5c
  variation 151: note = CpG site, residue is C if methylated or T(=U) if unmethylated
ttagtgtagaataggtattgtttattatataggttagaagaggtgttttttttatattggttattgaaattatttattggtagtagtgggtgttatttggaaaataagatggttttttttgtagagtaggttattttgtcggaggtgtttygatgcgtgtgaagtagggttggaggtatattataggtattttttagttttttaaataatattgtagtgtagattttgttggtttttttagagaaggggaaacggaaatttatagaagtaattagaggagtgagtagaagtttaggtatg

SEQ ID NO: 56 - DNA, 300 bp, synthetic construct
  source 1..300: mol_type = other DNA
  modified_base 1: mod_base = OTHER; note = uracil
  modified_base 5..6: mod_base = OTHER; note = uracil
  modified_base 11: mod_base = OTHER; note = uracil
  modified_base 14: mod_base = OTHER; note = uracil
  modified_base 17: mod_base = OTHER; note = uracil
  modified_base 19: mod_base = OTHER; note = uracil
  modified_base 21: mod_base = OTHER; note = uracil
  modified_base 23..24: mod_base = OTHER; note = uracil
  modified_base 26: mod_base = OTHER; note = uracil
  modified_base 33: mod_base = OTHER; note = uracil
  modified_base 36: mod_base = OTHER; note = uracil
  modified_base 46: mod_base = OTHER; note = uracil
  modified_base 52..55: mod_base = OTHER; note = uracil
  modified_base 58: mod_base = OTHER; note = uracil
  modified_base 60: mod_base = OTHER; note = uracil
  modified_base 69..70: mod_base = OTHER; note = uracil
  modified_base 73: mod_base = OTHER; note = uracil
  modified_base 79: mod_base = OTHER; note = uracil
  modified_base 82: mod_base = OTHER; note = uracil
  modified_base 84: mod_base = OTHER; note = uracil
  modified_base 87: mod_base = OTHER; note = uracil
  modified_base 104: mod_base = OTHER; note = uracil
  modified_base 114..115: mod_base = OTHER; note = uracil
  modified_base 125..126: mod_base = OTHER; note = uracil
  modified_base 128..129: mod_base = OTHER; note = uracil
  modified_base 132..134: mod_base = OTHER; note = uracil
  modified_base 137: mod_base = OTHER; note = uracil
  modified_base 140: mod_base = OTHER; note = uracil
  modified_base 142: mod_base = OTHER; note = uracil
  modified_base 146: mod_base = OTHER; note = uracil
  modified_base 154: mod_base = OTHER; note = uracil
  modified_base 156..157: mod_base = OTHER; note = uracil
  modified_base 159: mod_base = OTHER; note = uracil
  modified_base 163: mod_base = OTHER; note = uracil
  modified_base 171..172: mod_base = OTHER; note = uracil
  modified_base 175: mod_base = OTHER; note = uracil
  modified_base 177: mod_base = OTHER; note = uracil
  modified_base 180: mod_base = OTHER; note = uracil
  modified_base 189..190: mod_base = OTHER; note = uracil
  modified_base 193: mod_base = OTHER; note = uracil
  modified_base 201..202: mod_base = OTHER; note = uracil
  modified_base 209: mod_base = OTHER; note = uracil
  modified_base 211..213: mod_base = OTHER; note = uracil
  modified_base 215: mod_base = OTHER; note = uracil
  modified_base 218: mod_base = OTHER; note = uracil
  modified_base 221..222: mod_base = OTHER; note = uracil
  modified_base 235: mod_base = OTHER; note = uracil
  modified_base 241..242: mod_base = OTHER; note = uracil
  modified_base 256: mod_base = OTHER; note = uracil
  modified_base 258..259: mod_base = OTHER; note = uracil
  modified_base 261: mod_base = OTHER; note = uracil
  modified_base 264: mod_base = OTHER; note = uracil
  modified_base 268..269: mod_base = OTHER; note = uracil
  modified_base 281: mod_base = OTHER; note = uracil
  modified_base 286..287: mod_base = OTHER; note = uracil
  modified_base 292: mod_base = OTHER; note = uracil
  modified_base 295: mod_base = OTHER; note = uracil
  modified_base 297: mod_base = OTHER; note = uracil
  modified_base 47: mod_base = m5c
  modified_base 144: mod_base = m5c
  modified_base 160: mod_base = m5c
  variation 149: note = CpG site, residue is C if methylated or T(=U) if unmethylated
tatatttgggtttttatttatttttttagttgtttttgtgagttttcgtttttttttttttgaaagaattaataagatttatattatagtgttgtttgaaggattagagagtgtttgtagtgtgtttttaattttgttttatacgtatygggatattttcggtagggtggtttgttttgtagggagggttattttgttttttaagtggtatttattgttgttagtgagtagttttagtggttagtgtggagagggtattttttttggtttgtatggtgggtagtgtttgttttgtattgg

SEQ ID NO: 57 - DNA, 300 bp, synthetic construct
  source 1..300: mol_type = other DNA
  modified_base 2: mod_base = OTHER; note = uracil
  modified_base 6: mod_base = OTHER; note = uracil
  modified_base 9: mod_base = OTHER; note = uracil
  modified_base 14: mod_base = OTHER; note = uracil
  modified_base 24..26: mod_base = OTHER; note = uracil
  modified_base 31..34: mod_base = OTHER; note = uracil
  modified_base 37: mod_base = OTHER; note = uracil
  modified_base 41..42: mod_base = OTHER; note = uracil
  modified_base 46: mod_base = OTHER; note = uracil
  modified_base 49: mod_base = OTHER; note = uracil
  modified_base 52: mod_base = OTHER; note = uracil
  modified_base 57: mod_base = OTHER; note = uracil
  modified_base 62..63: mod_base = OTHER; note = uracil
  modified_base 71..72: mod_base = OTHER; note = uracil
  modified_base 74: mod_base = OTHER; note = uracil
  modified_base 76: mod_base = OTHER; note = uracil
  modified_base 80..83: mod_base = OTHER; note = uracil
  modified_base 87..89: mod_base = OTHER; note = uracil
  modified_base 92: mod_base = OTHER; note = uracil
  modified_base 98: mod_base = OTHER; note = uracil
  modified_base 100: mod_base = OTHER; note = uracil
  modified_base 104..106: mod_base = OTHER; note = uracil
  modified_base 113: mod_base = OTHER; note = uracil
  modified_base 119..122: mod_base = OTHER; note = uracil
  modified_base 124..126: mod_base = OTHER; note = uracil
  modified_base 130: mod_base = OTHER; note = uracil
  modified_base 134: mod_base = OTHER; note = uracil
  modified_base 136: mod_base = OTHER; note = uracil
  modified_base 145: mod_base = OTHER; note = uracil
  modified_base 147: mod_base = OTHER; note = uracil
  modified_base 154..155: mod_base = OTHER; note = uracil
  modified_base 162..163: mod_base = OTHER; note = uracil
  modified_base 171: mod_base = OTHER; note = uracil
  modified_base 178: mod_base = OTHER; note = uracil
  modified_base 183: mod_base = OTHER; note = uracil
  modified_base 191..192: mod_base = OTHER; note = uracil
  modified_base 196: mod_base = OTHER; note = uracil
  modified_base 198..199: mod_base = OTHER; note = uracil
  modified_base 202: mod_base = OTHER; note = uracil
  modified_base 205..207: mod_base = OTHER; note = uracil
  modified_base 209..210: mod_base = OTHER; note = uracil
  modified_base 214..216: mod_base = OTHER; note = uracil
  modified_base 218: mod_base = OTHER; note = uracil
  modified_base 221: mod_base = OTHER; note = uracil
  modified_base 223..225: mod_base = OTHER; note = uracil
  modified_base 231: mod_base = OTHER; note = uracil
  modified_base 236..238: mod_base = OTHER; note = uracil
  modified_base 240..243: mod_base = OTHER; note = uracil
  modified_base 245: mod_base = OTHER; note = uracil
  modified_base 247: mod_base = OTHER; note = uracil
  modified_base 249..250: mod_base = OTHER; note = uracil
  modified_base 256: mod_base = OTHER; note = uracil
  modified_base 261..262: mod_base = OTHER; note = uracil
  modified_base 268: mod_base = OTHER; note = uracil
  modified_base 271: mod_base = OTHER; note = uracil
  modified_base 274: mod_base = OTHER; note = uracil
  modified_base 283: mod_base = OTHER; note = uracil
  modified_base 286..287: mod_base = OTHER; note = uracil
  modified_base 289: mod_base = OTHER; note = uracil
  modified_base 3: mod_base = m5c
  modified_base 27: mod_base = m5c
  modified_base 35: mod_base = m5c
  modified_base 131: mod_base = m5c
  modified_base 156: mod_base = m5c
  modified_base 164: mod_base = m5c
  modified_base 180: mod_base = m5c
  modified_base 226: mod_base = m5c
  modified_base 232: mod_base = m5c
  variation 150: note = CpG site, residue is C if methylated or T(=U) if unmethylated
ttcggtattaatttttaatgagttttcgagttttcgtagttttgtttatttttttttttttttagtgaatttttatagttttttttttttgtatgttttttgttttaaatttttgaagttttttttttttcgttttttaagaatttttaygaattcgaaagttcgtgaggttgatggtacgtttgtggttttttttttttttttttttttatatttatagtttttcgggatcggattttttttatttattaggtgtagggttaggggtagtagtaggaggaatagttataggtagaggtg

SEQ ID NO: 58 - DNA, 300 bp, synthetic construct
  source 1..300: mol_type = other DNA
  modified_base 1: mod_base = OTHER; note = uracil
  modified_base 3..4: mod_base = OTHER; note = uracil
  modified_base 6: mod_base = OTHER; note = uracil
  modified_base 9..10: mod_base = OTHER; note = uracil
  modified_base 16: mod_base = OTHER; note = uracil
  modified_base 21..22: mod_base = OTHER; note = uracil
  modified_base 24..25: mod_base = OTHER; note = uracil
  modified_base 28: mod_base = OTHER; note = uracil
  modified_base 31: mod_base = OTHER; note = uracil
  modified_base 34..37: mod_base = OTHER; note = uracil
  modified_base 41..43: mod_base = OTHER; note = uracil
  modified_base 46: mod_base = OTHER; note = uracil
  modified_base 48..49: mod_base = OTHER; note = uracil
  modified_base 67: mod_base = OTHER; note = uracil
  modified_base 72..73: mod_base = OTHER; note = uracil
  modified_base 81: mod_base = OTHER; note = uracil
  modified_base 113..114: mod_base = OTHER; note = uracil
  modified_base 116: mod_base = OTHER; note = uracil
  modified_base 124..125: mod_base = OTHER; note = uracil
  modified_base 128: mod_base = OTHER; note = uracil
  modified_base 131..132: mod_base = OTHER; note = uracil
  modified_base 134: mod_base = OTHER; note = uracil
  modified_base 140: mod_base = OTHER; note = uracil
  modified_base 160: mod_base = OTHER; note = uracil
  modified_base 183: mod_base = OTHER; note = uracil
  modified_base 186: mod_base = OTHER; note = uracil
  modified_base 199: mod_base = OTHER; note = uracil
  modified_base 206: mod_base = OTHER; note = uracil
  modified_base 210: mod_base = OTHER; note = uracil
  modified_base 223: mod_base = OTHER; note = uracil
  modified_base 234: mod_base = OTHER; note = uracil
  modified_base 236: mod_base = OTHER; note = uracil
  modified_base 257: mod_base = OTHER; note = uracil
  modified_base 262: mod_base = OTHER; note = uracil
  modified_base 271: mod_base = OTHER; note = uracil
  modified_base 279: mod_base = OTHER; note = uracil
  modified_base 281: mod_base = OTHER; note = uracil
  modified_base 296: mod_base = OTHER; note = uracil
  modified_base 68: mod_base = m5c
  modified_base 74: mod_base = m5c
  modified_base 120: mod_base = m5c
  modified_base 136: mod_base = m5c
  modified_base 144: mod_base = m5c
  modified_base 169: mod_base = m5c
  modified_base 265: mod_base = m5c
  modified_base 273: mod_base = m5c
  modified_base 297: mod_base = m5c
  variation 150: note = CpG site, residue is C if methylated or T(=U) if unmethylated
  variation 150: note = CpG site, residue is C if methylated or T(=U) if unmethylated
tatttttatttgtggttgttttttttgttgttgtttttggttttgtatttggtgagtggggagggttcggtttcggggagttgtgggtatggagggaagaaggagaaaggaattatagacgtgttattagttttacgggttttcgggttygtagagatttttaagagacggaaagggaggggttttagaaatttgggatagagaatatgtagggaaaggggattgtgaggatttattggaaaagaaaagaagtagataggattgcgggggttcggggatttattaagaattgatgtcgga

SEQ ID NO: 59 - DNA, 300 bp, synthetic construct
  source 1..300: mol_type = other DNA
  modified_base 3..4: mod_base = OTHER; note = uracil
  modified_base 9: mod_base = OTHER; note = uracil
  modified_base 11: mod_base = OTHER; note = uracil
  modified_base 20: mod_base = OTHER; note = uracil
  modified_base 33: mod_base = OTHER; note = uracil
  modified_base 36: mod_base = OTHER; note = uracil
  modified_base 39: mod_base = OTHER; note = uracil
  modified_base 42..43: mod_base = OTHER; note = uracil
  modified_base 45..46: mod_base = OTHER; note = uracil
  modified_base 49..51: mod_base = OTHER; note = uracil
  modified_base 56: mod_base = OTHER; note = uracil
  modified_base 64: mod_base = OTHER; note = uracil
  modified_base 67..68: mod_base = OTHER; note = uracil
  modified_base 70: mod_base = OTHER; note = uracil
  modified_base 74: mod_base = OTHER; note = uracil
  modified_base 76: mod_base = OTHER; note = uracil
  modified_base 80..82: mod_base = OTHER; note = uracil
  modified_base 85..86: mod_base = OTHER; note = uracil
  modified_base 93..94: mod_base = OTHER; note = uracil
  modified_base 98: mod_base = OTHER; note = uracil
  modified_base 100..101: mod_base = OTHER; note = uracil
  modified_base 108: mod_base = OTHER; note = uracil
  modified_base 110..112: mod_base = OTHER; note = uracil
  modified_base 120: mod_base = OTHER; note = uracil
  modified_base 124: mod_base = OTHER; note = uracil
  modified_base 126..127: mod_base = OTHER; note = uracil
  modified_base 130..131: mod_base = OTHER; note = uracil
  modified_base 139: mod_base = OTHER; note = uracil
  modified_base 143: mod_base = OTHER; note = uracil
  modified_base 145..146: mod_base = OTHER; note = uracil
  modified_base 163: mod_base = OTHER; note = uracil
  modified_base 174: mod_base = OTHER; note = uracil
  modified_base 181: mod_base = OTHER; note = uracil
  modified_base 187..189: mod_base = OTHER; note = uracil
  modified_base 191: mod_base = OTHER; note = uracil
  modified_base 193..194: mod_base = OTHER; note = uracil
  modified_base 196: mod_base = OTHER; note = uracil
  modified_base 205: mod_base = OTHER; note = uracil
  modified_base 209: mod_base = OTHER; note = uracil
  modified_base 216..217: mod_base = OTHER; note = uracil
  modified_base 220: mod_base = OTHER; note = uracil
  modified_base 235: mod_base = OTHER; note = uracil
  modified_base 238: mod_base = OTHER; note = uracil
  modified_base 244: mod_base = OTHER; note = uracil
  modified_base 246: mod_base = OTHER; note = uracil
  modified_base 250: mod_base = OTHER; note = uracil
  modified_base 254: mod_base = OTHER; note = uracil
  modified_base 257: mod_base = OTHER; note = uracil
  modified_base 263: mod_base = OTHER; note = uracil
  modified_base 268: mod_base = OTHER; note = uracil
  modified_base 276: mod_base = OTHER; note = uracil
  modified_base 279: mod_base = OTHER; note = uracil
  modified_base 284: mod_base = OTHER; note = uracil
  modified_base 286..288: mod_base = OTHER; note = uracil
  modified_base 290..291: mod_base = OTHER; note = uracil
  modified_base 293: mod_base = OTHER; note = uracil
  modified_base 295..296: mod_base = OTHER; note = uracil
  modified_base 34: mod_base = m5c
  modified_base 57: mod_base = m5c
  modified_base 61: mod_base = m5c
  modified_base 71: mod_base = m5c
  modified_base 156: mod_base = m5c
  modified_base 164: mod_base = m5c
  modified_base 227: mod_base = m5c
  modified_base 239: mod_base = m5c
  modified_base 264: mod_base = m5c
  variation 150: note = CpG site, residue is C if methylated or T(=U) if unmethylated
agtttgtgtttaggaataattaaggagtggagtcgtattaattttttttttaaattcggacgttttttttcgatttaagtttagtttgagggttattttttttgatttatttttggaaatagatattagttaagggagttgttttttggygttgacgaggattcgatttaggttagtattttagtttttattttatagaggaatttgattggaggttagttgtggtcgatgagttattcggaatataagtaggtagttattttcgaattaaatggtatttgatttttttttttattttga

SEQ ID NO: 60 - DNA, 300 bp, synthetic construct
  source 1..300: mol_type = other DNA
  modified_base 2: mod_base = OTHER; note = uracil
  modified_base 20: mod_base = OTHER; note = uracil
  modified_base 26..27: mod_base = OTHER; note = uracil
  modified_base 45: mod_base = OTHER; note = uracil
  modified_base 48..49: mod_base = OTHER; note = uracil
  modified_base 52: mod_base = OTHER; note = uracil
  modified_base 60: mod_base = OTHER; note = uracil
  modified_base 68: mod_base = OTHER; note = uracil
  modified_base 70: mod_base = OTHER; note = uracil
  modified_base 76..77: mod_base = OTHER; note = uracil
  modified_base 79: mod_base = OTHER; note = uracil
  modified_base 82: mod_base = OTHER; note = uracil
  modified_base 86..87: mod_base = OTHER; note = uracil
  modified_base 89..90: mod_base = OTHER; note = uracil
  modified_base 94: mod_base = OTHER; note = uracil
  modified_base 100..101: mod_base = OTHER; note = uracil
  modified_base 103: mod_base = OTHER; note = uracil
  modified_base 117: mod_base = OTHER; note = uracil
  modified_base 125: mod_base = OTHER; note = uracil
  modified_base 129..130: mod_base = OTHER; note = uracil
  modified_base 141..142: mod_base = OTHER; note = uracil
  modified_base 147: mod_base = OTHER; note = uracil
  modified_base 152..153: mod_base = OTHER; note = uracil
  modified_base 160: mod_base = OTHER; note = uracil
  modified_base 163: mod_base = OTHER; note = uracil
  modified_base 165..167: mod_base = OTHER; note = uracil
  modified_base 172: mod_base = OTHER; note = uracil
  modified_base 179: mod_base = OTHER; note = uracil
  modified_base 185..186: mod_base = OTHER; note = uracil
  modified_base 197: mod_base = OTHER; note = uracil
  modified_base 209..211: mod_base = OTHER; note = uracil
  modified_base 213: mod_base = OTHER; note = uracil
  modified_base 217: mod_base = OTHER; note = uracil
  modified_base 222: mod_base = OTHER; note = uracil
  modified_base 242: mod_base = OTHER; note = uracil
  modified_base 269: mod_base = OTHER; note = uracil
  modified_base 271..272: mod_base = OTHER; note = uracil
  modified_base 274: mod_base = OTHER; note = uracil
  modified_base 276..277: mod_base = OTHER; note = uracil
  modified_base 287..288: mod_base = OTHER; note = uracil
  modified_base 293: mod_base = OTHER; note = uracil
  modified_base 295: mod_base = OTHER; note = uracil
  modified_base 299: mod_base = OTHER; note = uracil
  modified_base 36: mod_base = m5c
  modified_base 61: mod_base = m5c
  modified_base 73: mod_base = m5c
  modified_base 136: mod_base = m5c
  modified_base 144: mod_base = m5c
  modified_base 229: mod_base = m5c
  modified_base 239: mod_base = m5c
  modified_base 243: mod_base = m5c
  modified_base 266: mod_base = m5c
  variation 150: note = CpG site, residue is C if methylated or T(=U) if unmethylated
ttaaggtgaggagggagattagatgttatttagttcggaaatagttgtttgtttgtgtttcggatgatttatcgattatagttggtttttagttagatttttttgtggagtgggaattagaatattgatttaaatcggattttcgttaaygttaggagatagtttttttggttggtgtttgtttttaagggtgaattaaggagaatggtttttaggttgggtttgagtcggaggaagacgttcggatttgggaaggaggttgatgcggttttattttttagttatttttgagtataggtt

SEQ ID NO: 61 - DNA, 300 bp, synthetic construct
  source 1..300: mol_type = other DNA
  modified_base 3..4: mod_base = OTHER; note = uracil
  modified_base 6: mod_base = OTHER; note = uracil
  modified_base 12: mod_base = OTHER; note = uracil
  modified_base 22: mod_base = OTHER; note = uracil
  modified_base 31: mod_base = OTHER; note = uracil
  modified_base 36: mod_base = OTHER; note = uracil
  modified_base 60: mod_base = OTHER; note = uracil
  modified_base 62: mod_base = OTHER; note = uracil
  modified_base 69: mod_base = OTHER; note = uracil
  modified_base 73..74: mod_base = OTHER; note = uracil
  modified_base 77: mod_base = OTHER; note = uracil
  modified_base 81..82: mod_base = OTHER; note = uracil
  modified_base 87: mod_base = OTHER; note = uracil
  modified_base 91: mod_base = OTHER; note = uracil
  modified_base 95..96: mod_base = OTHER; note = uracil
  modified_base 118..119: mod_base = OTHER; note = uracil
  modified_base 128: mod_base = OTHER; note = uracil
  modified_base 130: mod_base = OTHER; note = uracil
  modified_base 135: mod_base = OTHER; note = uracil
  modified_base 142..143: mod_base = OTHER; note = uracil
  modified_base 154: mod_base = OTHER; note = uracil
  modified_base 160..161: mod_base = OTHER; note = uracil
  modified_base 167: mod_base = OTHER; note = uracil
  modified_base 172: mod_base = OTHER; note = uracil
  modified_base 189..190: mod_base = OTHER; note = uracil
  modified_base 193: mod_base = OTHER; note = uracil
  modified_base 197..199: mod_base = OTHER; note = uracil
  modified_base 205: mod_base = OTHER; note = uracil
  modified_base 219: mod_base = OTHER; note = uracil
  modified_base 223..224: mod_base = OTHER; note = uracil
  modified_base 226: mod_base = OTHER; note = uracil
  modified_base 232..233: mod_base = OTHER; note = uracil
  modified_base 240: mod_base = OTHER; note = uracil
  modified_base 242: mod_base = OTHER; note = uracil
  modified_base 255..260: mod_base = OTHER; note = uracil
  modified_base 264: mod_base = OTHER; note = uracil
  modified_base 266: mod_base = OTHER; note = uracil
  modified_base 268: mod_base = OTHER; note = uracil
  modified_base 272: mod_base = OTHER; note = uracil
  modified_base 274: mod_base = OTHER; note = uracil
  modified_base 278: mod_base = OTHER; note = uracil
  modified_base 288..289: mod_base = OTHER; note = uracil
  modified_base 295: mod_base = OTHER; note = uracil
  modified_base 97: mod_base = m5c
  modified_base 111: mod_base = m5c
  modified_base 181: mod_base = m5c
  modified_base 183: mod_base = m5c
  modified_base 220: mod_base = m5c
  variation 150: note = CpG site, residue is C if methylated or T(=U) if unmethylated
gattttaggatttgaatggtttttggagttttttgtagatgaggtaatgttttggttaatttataggttagatttgttgtttttagttaatttgttcgggaggtttttaacggaaggtttgtgttagtataaattatattttttgatgaygagtagagattttgatttggttttaaagaacgcgttttttaatttattttgggatttttttgaattagtcggttatatatattagggtttttagaggatttttttttttttttttttttgtttttttttgggttttttttattattaatt

SEQ ID NO: 62 - DNA, 300 bp, synthetic construct
  source 1..300: mol_type = other DNA
  modified_base 18..20: mod_base = OTHER; note = uracil
  modified_base 30: mod_base = OTHER; note = uracil
  modified_base 53..54: mod_base = OTHER; note = uracil
  modified_base 56: mod_base = OTHER; note = uracil
  modified_base 63..65: mod_base = OTHER; note = uracil
  modified_base 78: mod_base = OTHER; note = uracil
  modified_base 82: mod_base = OTHER; note = uracil
  modified_base 88: mod_base = OTHER; note = uracil
  modified_base 97..99: mod_base = OTHER; note = uracil
  modified_base 122: mod_base = OTHER; note = uracil
  modified_base 130..131: mod_base = OTHER; note = uracil
  modified_base 136: mod_base = OTHER; note = uracil
  modified_base 142: mod_base = OTHER; note = uracil
  modified_base 144: mod_base = OTHER; note = uracil
  modified_base 147: mod_base = OTHER; note = uracil
  modified_base 152: mod_base = OTHER; note = uracil
  modified_base 155: mod_base = OTHER; note = uracil
  modified_base 173: mod_base = OTHER; note = uracil
  modified_base 177: mod_base = OTHER; note = uracil
  modified_base 179: mod_base = OTHER; note = uracil
  modified_base 183..184: mod_base = OTHER; note = uracil
  modified_base 187: mod_base = OTHER; note = uracil
  modified_base 197..198: mod_base = OTHER; note = uracil
  modified_base 200..201: mod_base = OTHER; note = uracil
  modified_base 206: mod_base = OTHER; note = uracil
  modified_base 214: mod_base = OTHER; note = uracil
  modified_base 221: mod_base = OTHER; note = uracil
  modified_base 224: mod_base = OTHER; note = uracil
  modified_base 229: mod_base = OTHER; note = uracil
  modified_base 233..234: mod_base = OTHER; note = uracil
  modified_base 245..246: mod_base = OTHER; note = uracil
  modified_base 251: mod_base = OTHER; note = uracil
  modified_base 256..257: mod_base = OTHER; note = uracil
  modified_base 259: mod_base = OTHER; note = uracil
  modified_base 262: mod_base = OTHER; note = uracil
  modified_base 265: mod_base = OTHER; note = uracil
  modified_base 272: mod_base = OTHER; note = uracil
  modified_base 274..275: mod_base = OTHER; note = uracil
  modified_base 281..282: mod_base = OTHER; note = uracil
  modified_base 286: mod_base = OTHER; note = uracil
  modified_base 291..292: mod_base = OTHER; note = uracil
  modified_base 299..300: mod_base = OTHER; note = uracil
  modified_base 79: mod_base = m5c
  modified_base 116: mod_base = m5c
  modified_base 118: mod_base = m5c
  modified_base 188: mod_base = m5c
  modified_base 202: mod_base = m5c
  variation 149: note = CpG site, residue is C if methylated or T(=U) if unmethylated
attagtaataggaaaaatttagaaagagatagagagaaaggggggaaaaaattttttgagaattttggtatatgtggtcggttaatttaaaaaagttttagggtaagttggaaaacgcgttttttaagattagattaaggtttttgttygttattaggaaatatgatttgtgttaatataggtttttcgttaaaaatttttcgggtaagttagttaaggatagtaggtttgatttatgagttaattaaaatattattttatttgtaaagaattttaagaattatttagattttgaggttt

SEQ ID NO: 63 - DNA, 300 bp, synthetic construct
  source 1..300: mol_type = other DNA
  modified_base 2..3: mod_base = OTHER; note = uracil
  modified_base 9..11: mod_base = OTHER; note = uracil
  modified_base 19: mod_base = OTHER; note = uracil
  modified_base 21: mod_base = OTHER; note = uracil
  modified_base 28: mod_base = OTHER; note = uracil
  modified_base 30..31: mod_base = OTHER; note = uracil
  modified_base 33..34: mod_base = OTHER; note = uracil
  modified_base 42: mod_base = OTHER; note = uracil
  modified_base 44: mod_base = OTHER; note = uracil
  modified_base 47: mod_base = OTHER; note = uracil
  modified_base 54: mod_base = OTHER; note = uracil
  modified_base 56: mod_base = OTHER; note = uracil
  modified_base 63..64: mod_base = OTHER; note = uracil
  modified_base 66: mod_base = OTHER; note = uracil
  modified_base 69: mod_base = OTHER; note = uracil
  modified_base 81: mod_base = OTHER; note = uracil
  modified_base 83..84: mod_base = OTHER; note = uracil
  modified_base 95: mod_base = OTHER; note = uracil
  modified_base 97: mod_base = OTHER; note = uracil
  modified_base 99..100: mod_base = OTHER; note = uracil
  modified_base 105: mod_base = OTHER; note = uracil
  modified_base 107..109: mod_base = OTHER; note = uracil
  modified_base 111..112: mod_base = OTHER; note = uracil
  modified_base 124: mod_base = OTHER; note = uracil
  modified_base 127: mod_base = OTHER; note = uracil
  modified_base 129: mod_base = OTHER; note = uracil
  modified_base 132: mod_base = OTHER; note = uracil
  modified_base 134..137: mod_base = OTHER; note = uracil
  modified_base 141: mod_base = OTHER; note = uracil
  modified_base 143: mod_base = OTHER; note = uracil
  modified_base 145: mod_base = OTHER; note = uracil
  modified_base 147: mod_base = OTHER; note = uracil
  modified_base 153: mod_base = OTHER; note = uracil
  modified_base 162: mod_base = OTHER; note = uracil
  modified_base 168: mod_base = OTHER; note = uracil
  modified_base 175..177: mod_base = OTHER; note = uracil
  modified_base 179: mod_base = OTHER; note = uracil
  modified_base 185: mod_base = OTHER; note = uracil
  modified_base 187: mod_base = OTHER; note = uracil
  modified_base 194..195: mod_base = OTHER; note = uracil
  modified_base 198: mod_base = OTHER; note = uracil
  modified_base 200..202: mod_base = OTHER; note = uracil
  modified_base 204..205: mod_base = OTHER; note = uracil
  modified_base 209: mod_base = OTHER; note = uracil
  modified_base 213..214: mod_base = OTHER; note = uracil
  modified_base 217..218: mod_base = OTHER; note = uracil
  modified_base 221: mod_base = OTHER; note = uracil
  modified_base 224: mod_base = OTHER; note = uracil
  modified_base 232: mod_base = OTHER; note = uracil
  modified_base 238: mod_base = OTHER; note = uracil
  modified_base 241: mod_base = OTHER; note = uracil
  modified_base 244: mod_base = OTHER; note = uracil
  modified_base 250: mod_base = OTHER; note = uracil
  modified_base 253: mod_base = OTHER; note = uracil
  modified_base 262: mod_base = OTHER; note = uracil
  modified_base 264..265: mod_base = OTHER; note = uracil
  modified_base 270..271: mod_base = OTHER; note = uracil
  modified_base 277: mod_base = OTHER; note = uracil
  modified_base 280: mod_base = OTHER; note = uracil
  modified_base 282..284: mod_base = OTHER; note = uracil
  modified_base 288..290: mod_base = OTHER; note = uracil
  modified_base 298: mod_base = OTHER; note = uracil
  modified_base 12: mod_base = m5c
  modified_base 15: mod_base = m5c
  modified_base 148: mod_base = m5c
  modified_base 169: mod_base = m5c
  modified_base 206: mod_base = m5c
  modified_base 266: mod_base = m5c
  variation 150: note = CpG site, residue is C if methylated or T(=U) if unmethylated
gtttggaatttcggcgattttttgtttttttattaagggaattttgtttgtaatattttaagttttagttgaaaagtggttttttgggtgaagttttatttgtgtatttatttgagggtgagttagttttgtttttttggtttttatcgyggttgttatagtatttatcggagttttatagtgatttatttgtttattattttttcgataaattttttagtttttgaagggtagagatagtattataattattttttataattttcgtgtttagtgttatttttaatttttagtaagtat

SEQ ID NO: 64 - DNA, 300 bp, synthetic construct
  source 1..300: mol_type = other DNA
  modified_base 4: mod_base = OTHER; note = uracil
  modified_base 8: mod_base = OTHER; note = uracil
  modified_base 25: mod_base = OTHER; note = uracil
  modified_base 27: mod_base = OTHER; note = uracil
  modified_base 32: mod_base = OTHER; note = uracil
  modified_base 61: mod_base = OTHER; note = uracil
  modified_base 65: mod_base = OTHER; note = uracil
  modified_base 67: mod_base = OTHER; note = uracil
  modified_base 70..72: mod_base = OTHER; note = uracil
  modified_base 75: mod_base = OTHER; note = uracil
  modified_base 81: mod_base = OTHER; note = uracil
  modified_base 109: mod_base = OTHER; note = uracil
  modified_base 118: mod_base = OTHER; note = uracil
  modified_base 120: mod_base = OTHER; note = uracil
  modified_base 128: mod_base = OTHER; note = uracil
  modified_base 130: mod_base = OTHER; note = uracil
  modified_base 140: mod_base = OTHER; note = uracil
  modified_base 146: mod_base = OTHER; note = uracil
  modified_base 149: mod_base = OTHER; note = uracil
  modified_base 161..162: mod_base = OTHER; note = uracil
  modified_base 170: mod_base = OTHER; note = uracil
  modified_base 175: mod_base = OTHER; note = uracil
  modified_base 179: mod_base = OTHER; note = uracil
  modified_base 181: mod_base = OTHER; note = uracil
  modified_base 183..185: mod_base = OTHER; note = uracil
  modified_base 187: mod_base = OTHER; note = uracil
  modified_base 197: mod_base = OTHER; note = uracil
  modified_base 199: mod_base = OTHER; note = uracil
  modified_base 208: mod_base = OTHER; note = uracil
  modified_base 211: mod_base = OTHER; note = uracil
  modified_base 213..215: mod_base = OTHER; note = uracil
  modified_base 222..223: mod_base = OTHER; note = uracil
  modified_base 225: mod_base = OTHER; note = uracil
  modified_base 230: mod_base = OTHER; note = uracil
  modified_base 233: mod_base = OTHER; note = uracil
  modified_base 239: mod_base = OTHER; note = uracil
  modified_base 251: mod_base = OTHER; note = uracil
  modified_base 255: mod_base = OTHER; note = uracil
  modified_base 262..264: mod_base = OTHER; note = uracil
  modified_base 277: mod_base = OTHER; note = uracil
  modified_base 287: mod_base = OTHER; note = uracil
  modified_base 295..296: mod_base = OTHER; note = uracil
  modified_base 300: mod_base = OTHER; note = uracil
  modified_base 34: mod_base = m5c
  modified_base 94: mod_base = m5c
  modified_base 131: mod_base = m5c
  modified_base 152: mod_base = m5c
  modified_base 285: mod_base = m5c
  modified_base 288: mod_base = m5c
  variation 150: note = CpG site, residue is C if methylated or T(=U) if unmethylated
atgtttattagggattgggagtagtattaggtacgggagttataaaagatgattatgatgttgtttttgttttttagaagttggaaggtttgtcgggagggtgatggataaatgagttattgtgggatttcggtaaatgttataatagtygcggtgagagttaggggagtagagttgatttatttttaggtgggtgtataggtgagattttatttaggagattattttttagttgaggtttaaagtgttataagtagagtttttttggtggagaaataagagatcgtcggggttttaggt

SEQ ID NO: 65 - DNA, 300 bp, synthetic construct
  source 1..300: mol_type = other DNA
  modified_base 4..6: mod_base = OTHER; note = uracil
  modified_base 9..11: mod_base = OTHER; note = uracil
  modified_base 21: mod_base = OTHER; note = uracil
  modified_base 29: mod_base = OTHER; note = uracil
  modified_base 33: mod_base = OTHER; note = uracil
  modified_base 42: mod_base = OTHER; note = uracil
  modified_base 46: mod_base = OTHER; note = uracil
  modified_base 55: mod_base = OTHER; note = uracil
  modified_base 59: mod_base = OTHER; note = uracil
  modified_base 65: mod_base = OTHER; note = uracil
  modified_base 67: mod_base = OTHER; note = uracil
  modified_base 69: mod_base = OTHER; note = uracil
  modified_base 71: mod_base = OTHER; note = uracil
  modified_base 75: mod_base = OTHER; note = uracil
  modified_base 79..81: mod_base = OTHER; note = uracil
  modified_base 85..87: mod_base = OTHER; note = uracil
  modified_base 91: mod_base = OTHER; note = uracil
  modified_base 93: mod_base = OTHER; note = uracil
  modified_base 95: mod_base = OTHER; note = uracil
  modified_base 98: mod_base = OTHER; note = uracil
  modified_base 101: mod_base = OTHER; note = uracil
  modified_base 105: mod_base = OTHER; note = uracil
  modified_base 107..108: mod_base = OTHER; note = uracil
  modified_base 118..119: mod_base = OTHER; note = uracil
  modified_base 135: mod_base = OTHER; note = uracil
  modified_base 140: mod_base = OTHER; note = uracil
  modified_base 143: mod_base = OTHER; note = uracil
  modified_base 155..156: mod_base = OTHER; note = uracil
  modified_base 162: mod_base = OTHER; note = uracil
  modified_base 164: mod_base = OTHER; note = uracil
  modified_base 173..174: mod_base = OTHER; note = uracil
  modified_base 179: mod_base = OTHER; note = uracil
  modified_base 182..183: mod_base = OTHER; note = uracil
  modified_base 185..186: mod_base = OTHER; note = uracil
  modified_base 188: mod_base = OTHER; note = uracil
  modified_base 197..199: mod_base = OTHER; note = uracil
  modified_base 203..205: mod_base = OTHER; note = uracil
  modified_base 212: mod_base = OTHER; note = uracil
  modified_base 219..220: mod_base = OTHER; note = uracil
  modified_base 227..228: mod_base = OTHER; note = uracil
  modified_base 230: mod_base = OTHER; note = uracil
  modified_base 235: mod_base = OTHER; note = uracil
  modified_base 237..238: mod_base = OTHER; note = uracil
  modified_base 247: mod_base = OTHER; note = uracil
  modified_base 251: mod_base = OTHER; note = uracil
  modified_base 253: mod_base = OTHER; note = uracil
  modified_base 255..256: mod_base = OTHER; note = uracil
  modified_base 260..264: mod_base = OTHER; note = uracil
  modified_base 266..268: mod_base = OTHER; note = uracil
  modified_base 274: mod_base = OTHER; note = uracil
  modified_base 279: mod_base = OTHER; note = uracil
  modified_base 282: mod_base = OTHER; note = uracil
  modified_base 296..297: mod_base = OTHER; note = uracil
  modified_base 12: mod_base = m5c
  modified_base 24: mod_base = m5c
  modified_base 116: mod_base = m5c
  modified_base 157: mod_base = m5c
  modified_base 175: mod_base = m5c
  modified_base 257: mod_base = m5c
  variation 150: note = CpG site, residue is C if methylated or T(=U) if unmethylated
aatttttttttcgggatagttaacgaggtttttaatttaaatttgtatttgaagtttgtagagatttatattgatttatttaggttttaatatatagtagttgtttttatggttgcgttaggtagtgaaggatatagggtagtaggaaaygagtttcggtttttaggtggatttcgtgtttttatttttgttagagtttaggttttgagggtatagggttaaattgttatagagttttagagaaatttgtttttttcgttttttattttaagattgagttgttggaggaaagaggttagg

SEQ ID NO: 66 - DNA, 300 bp, synthetic construct
  source 1..300: mol_type = other DNA
  modified_base 1..2: mod_base = OTHER; note = uracil
  modified_base 6..7: mod_base = OTHER; note = uracil
  modified_base 9: mod_base = OTHER; note = uracil
  modified_base 13..14: mod_base = OTHER; note = uracil
  modified_base 16..17: mod_base = OTHER; note = uracil
  modified_base 20: mod_base = OTHER; note = uracil
  modified_base 23: mod_base = OTHER; note = uracil
  modified_base 25: mod_base = OTHER; note = uracil
  modified_base 29: mod_base = OTHER; note = uracil
  modified_base 52: mod_base = OTHER; note = uracil
  modified_base 59: mod_base = OTHER; note = uracil
  modified_base 61: mod_base = OTHER; note = uracil
  modified_base 67: mod_base = OTHER; note = uracil
  modified_base 69: mod_base = OTHER; note = uracil
  modified_base 75: mod_base = OTHER; note = uracil
  modified_base 83..85: mod_base = OTHER; note = uracil
  modified_base 90..92: mod_base = OTHER; note = uracil
  modified_base 94: mod_base = OTHER; note = uracil
  modified_base 99..100: mod_base = OTHER; note = uracil
  modified_base 105: mod_base = OTHER; note = uracil
  modified_base 107: mod_base = OTHER; note = uracil
  modified_base 111: mod_base = OTHER; note = uracil
  modified_base 123: mod_base = OTHER; note = uracil
  modified_base 131..132: mod_base = OTHER; note = uracil
  modified_base 134..135: mod_base = OTHER; note = uracil
  modified_base 142: mod_base = OTHER; note = uracil
  modified_base 148: mod_base = OTHER; note = uracil
  modified_base 155..156: mod_base = OTHER; note = uracil
  modified_base 159: mod_base = OTHER; note = uracil
  modified_base 162..164: mod_base = OTHER; note = uracil
  modified_base 170..171: mod_base = OTHER; note = uracil
  modified_base 174: mod_base = OTHER; note = uracil
  modified_base 176: mod_base = OTHER; note = uracil
  modified_base 179..180: mod_base = OTHER; note = uracil
  modified_base 186: mod_base = OTHER; note = uracil
  modified_base 189..190: mod_base = OTHER; note = uracil
  modified_base 198: mod_base = OTHER; note = uracil
  modified_base 201: mod_base = OTHER; note = uracil
  modified_base 204: mod_base = OTHER; note = uracil
  modified_base 217..218: mod_base = OTHER; note = uracil
  modified_base 228: mod_base = OTHER; note = uracil
  modified_base 238: mod_base = OTHER; note = uracil
  modified_base 240: mod_base = OTHER; note = uracil
  modified_base 243: mod_base = OTHER; note = uracil
  modified_base 247: mod_base = OTHER; note = uracil
  modified_base 250: mod_base = OTHER; note = uracil
  modified_base 256: mod_base = OTHER; note = uracil
  modified_base 273..274: mod_base = OTHER; note = uracil
  modified_base 282: mod_base = OTHER; note = uracil
  modified_base 286..287: mod_base = OTHER; note = uracil
  modified_base 43: mod_base = m5c
  modified_base 125: mod_base = m5c
  modified_base 143: mod_base = m5c
  modified_base 184: mod_base = m5c
  modified_base 276: mod_base = m5c
  modified_base 288: mod_base = m5c
  variation 150: note = CpG site, residue is C if methylated or T(=U) if unmethylated
tttggttttttttttttagtagtttagttttagggtgggggacgggagagatagatttttttggagttttgtggtaatttggttttatgtttttagggtttgggttttaatagaggtggaagtacgggatttatttgagaatcgggattygttttttgttgttttgtattttttattatttggcgtaattatggagatagttgttgtgtgttagggtttgggtaagttagtgtgagtttttgtaagttttaaatgtaagtttaaattgaaagtttcgttgattatttcggggaagggatt

SEQ ID NO: 67 - DNA, 300 bp, synthetic construct
  source 1..300: mol_type = other DNA
  modified_base 12: mod_base = OTHER; note = uracil
  modified_base 30: mod_base = OTHER; note = uracil
  modified_base 36: mod_base = OTHER; note = uracil
  modified_base 44: mod_base = OTHER; note = uracil
  modified_base 48..50: mod_base = OTHER; note = uracil
  modified_base 56: mod_base = OTHER; note = uracil
  modified_base 63: mod_base = OTHER; note = uracil
  modified_base 70: mod_base = OTHER; note = uracil
  modified_base 72: mod_base = OTHER; note = uracil
  modified_base 81: mod_base = OTHER; note = uracil
  modified_base 92..94: mod_base = OTHER; note = uracil
  modified_base 97: mod_base = OTHER; note = uracil
  modified_base 102..104: mod_base = OTHER; note = uracil
  modified_base 108: mod_base = OTHER; note = uracil
  modified_base 110..111: mod_base = OTHER; note = uracil
  modified_base 118..119: mod_base = OTHER; note = uracil
  modified_base 122: mod_base = OTHER; note = uracil
  modified_base 126: mod_base = OTHER; note = uracil
  modified_base 129..131: mod_base = OTHER; note = uracil
  modified_base 143: mod_base = OTHER; note = uracil
  modified_base 169: mod_base = OTHER; note = uracil
  modified_base 173: mod_base = OTHER; note = uracil
  modified_base 178..180: mod_base = OTHER; note = uracil
  modified_base 183..186: mod_base = OTHER; note = uracil
  modified_base 188..190: mod_base = OTHER; note = uracil
  modified_base 194: mod_base = OTHER; note = uracil
  modified_base 205: mod_base = OTHER; note = uracil
  modified_base 213: mod_base = OTHER; note = uracil
  modified_base 215: mod_base = OTHER; note = uracil
  modified_base 221: mod_base = OTHER; note = uracil
  modified_base 226..227: mod_base = OTHER; note = uracil
  modified_base 233..234: mod_base = OTHER; note = uracil
  modified_base 244..245: mod_base = OTHER; note = uracil
  modified_base 247: mod_base = OTHER; note = uracil
  modified_base 251: mod_base = OTHER; note = uracil
  modified_base 258..259: mod_base = OTHER; note = uracil
  modified_base 266: mod_base = OTHER; note = uracil
  modified_base 273: mod_base = OTHER; note = uracil
  modified_base 275: mod_base = OTHER; note = uracil
  modified_base 278: mod_base = OTHER; note = uracil
  modified_base 282: mod_base = OTHER; note = uracil
  modified_base 287: mod_base = OTHER; note = uracil
  modified_base 289..290: mod_base = OTHER; note = uracil
  modified_base 293..294: mod_base = OTHER; note = uracil
  modified_base 299: mod_base = OTHER; note = uracil
  modified_base 84: mod_base = m5c
  modified_base 195: mod_base = m5c
  modified_base 235: mod_base = m5c
  variation 151: note = CpG site, residue is C if methylated or T(=U) if unmethylated
aggaatgtttattgaaggagtgaatgaaattattgtattagattaagtttaggtgtagaggattggttttatatagaaagtatcgattttgttttatagaattttgattttagttttttagtagataattttggtgtgaagatagaggggyggggaggaaggtaggggttgatattttttagttttttttaggtcggtggggagttgaatagtttagtgatttgtttaggagttcgaggtaaattatagattaagagttaagagttatgatttattatttgtatttttttagttatgata

SEQ ID NO: 68 - DNA, 300 bp, synthetic construct
  source 1..300: mol_type = other DNA
  modified_base 4: mod_base = OTHER; note = uracil
  modified_base 9: mod_base = OTHER; note = uracil
  modified_base 20: mod_base = OTHER; note = uracil
  modified_base 32: mod_base = OTHER; note = uracil
  modified_base 37: mod_base = OTHER; note = uracil
  modified_base 39: mod_base = OTHER; note = uracil
  modified_base 44: mod_base = OTHER; note = uracil
  modified_base 46: mod_base = OTHER; note = uracil
  modified_base 52: mod_base = OTHER; note = uracil
  modified_base 62..63: mod_base = OTHER; note = uracil
  modified_base 69: mod_base = OTHER; note = uracil
  modified_base 71..72: mod_base = OTHER; note = uracil
  modified_base 77: mod_base = OTHER; note = uracil
  modified_base 82: mod_base = OTHER; note = uracil
  modified_base 84: mod_base = OTHER; note = uracil
  modified_base 89: mod_base = OTHER; note = uracil
  modified_base 94: mod_base = OTHER; note = uracil
  modified_base 97: mod_base = OTHER; note = uracil
  modified_base 99..102: mod_base = OTHER; note = uracil
  modified_base 104: mod_base = OTHER; note = uracil
  modified_base 108..109: mod_base = OTHER; note = uracil
  modified_base 119: mod_base = OTHER; note = uracil
  modified_base 130: mod_base = OTHER; note = uracil
  modified_base 133..136: mod_base = OTHER; note = uracil
  modified_base 139..140: mod_base = OTHER; note = uracil
  modified_base 143..144: mod_base = OTHER; note = uracil
  modified_base 146..148: mod_base = OTHER; note = uracil
  modified_base 151..154: mod_base = OTHER; note = uracil
  modified_base 156: mod_base = OTHER; note = uracil
  modified_base 160: mod_base = OTHER; note = uracil
  modified_base 163: mod_base = OTHER; note = uracil
  modified_base 165: mod_base = OTHER; note = uracil
  modified_base 167..168: mod_base = OTHER; note = uracil
  modified_base 177: mod_base = OTHER; note = uracil
  modified_base 180: mod_base = OTHER; note = uracil
  modified_base 188: mod_base = OTHER; note = uracil
  modified_base 195: mod_base = OTHER; note = uracil
  modified_base 202: mod_base = OTHER; note = uracil
  modified_base 210: mod_base = OTHER; note = uracil
  modified_base 221: mod_base = OTHER; note = uracil
  modified_base 225: mod_base = OTHER; note = uracil
  modified_base 235..236: mod_base = OTHER; note = uracil
  modified_base 240..241: mod_base = OTHER; note = uracil
  modified_base 243: mod_base = OTHER; note = uracil
  modified_base 246: mod_base = OTHER; note = uracil
  modified_base 248..249: mod_base = OTHER; note = uracil
  modified_base 254: mod_base = OTHER; note = uracil
  modified_base 260: mod_base = OTHER; note = uracil
  modified_base 266: mod_base = OTHER; note = uracil
  modified_base 275: mod_base = OTHER; note = uracil
  modified_base 279: mod_base = OTHER; note = uracil
  modified_base 281: mod_base = OTHER; note = uracil
  modified_base 283..284: mod_base = OTHER; note = uracil
  modified_base 287: mod_base = OTHER; note = uracil
  modified_base 294: mod_base = OTHER; note = uracil
  modified_base 298..299: mod_base = OTHER; note = uracil
  modified_base 65: mod_base = m5c
  modified_base 105: mod_base = m5c
  modified_base 216: mod_base = m5c
  variation 149: note = CpG site, residue is C if methylated or T(=U) if unmethylated
tgttatggttggagaaatgtaagtagtgaattatgatttttggtttttagtttgtggtttatttcgggtttttggataagttattgagttatttagttttttatcggtttgggaggggttgggaaatgttagtttttattttttttttygtttttttgtttttatattagggttgtttgttggaaaattggagttagggttttgtagggtaaaatcgatgttttttatgtgaaattagttttttgtatttgggtttgatttaatgtaatagttttatttatttttttagtaaatattttt

SEQ ID NO: 69 - DNA, 300 bp, synthetic construct
  source 1..300: mol_type = other DNA
  modified_base 2: mod_base = OTHER; note = uracil
  modified_base 17: mod_base = OTHER; note = uracil
  modified_base 19: mod_base = OTHER; note = uracil
  modified_base 21..22: mod_base = OTHER; note = uracil
  modified_base 24..25: mod_base = OTHER; note = uracil
  modified_base 29..30: mod_base = OTHER; note = uracil
  modified_base 34: mod_base = OTHER; note = uracil
  modified_base 67..68: mod_base = OTHER; note = uracil
  modified_base 70..71: mod_base = OTHER; note = uracil
  modified_base 79..80: mod_base = OTHER; note = uracil
  modified_base 89: mod_base = OTHER; note = uracil
  modified_base 95..98: mod_base = OTHER; note = uracil
  modified_base 102..103: mod_base = OTHER; note = uracil
  modified_base 105: mod_base = OTHER; note = uracil
  modified_base 113..114: mod_base = OTHER; note = uracil
  modified_base 116..118: mod_base = OTHER; note = uracil
  modified_base 120..121: mod_base = OTHER; note = uracil
  modified_base 126..127: mod_base = OTHER; note = uracil
  modified_base 129..131: mod_base = OTHER; note = uracil
  modified_base 138: mod_base = OTHER; note = uracil
  modified_base 147: mod_base = OTHER; note = uracil
  modified_base 157..158: mod_base = OTHER; note = uracil
  modified_base 160: mod_base = OTHER; note = uracil
  modified_base 163: mod_base = OTHER; note = uracil
  modified_base 165..166: mod_base = OTHER; note = uracil
  modified_base 170: mod_base = OTHER; note = uracil
  modified_base 172: mod_base = OTHER; note = uracil
  modified_base 177..178: mod_base = OTHER; note = uracil
  modified_base 188: mod_base = OTHER; note = uracil
  modified_base 191: mod_base = OTHER; note = uracil
  modified_base 211: mod_base = OTHER; note = uracil
  modified_base 214..215: mod_base = OTHER; note = uracil
  modified_base 219..221: mod_base = OTHER; note = uracil
  modified_base 227..229: mod_base = OTHER; note = uracil
  modified_base 233: mod_base = OTHER; note = uracil
  modified_base 249: mod_base = OTHER; note = uracil
  modified_base 253: mod_base = OTHER; note = uracil
  modified_base 255: mod_base = OTHER; note = uracil
  modified_base 258: mod_base = OTHER; note = uracil
  modified_base 260: mod_base = OTHER; note = uracil
  modified_base 262: mod_base = OTHER; note = uracil
  modified_base 265: mod_base = OTHER; note = uracil
  modified_base 268..269: mod_base = OTHER; note = uracil
  modified_base 271..272: mod_base = OTHER; note = uracil
  modified_base 274..275: mod_base = OTHER; note = uracil
  modified_base 278: mod_base = OTHER; note = uracil
  modified_base 285: mod_base = OTHER; note = uracil
  modified_base 294: mod_base = OTHER; note = uracil
  modified_base 300: mod_base = OTHER; note = uracil
  modified_base 31: mod_base = m5c
  modified_base 167: mod_base = m5c
  modified_base 279: mod_base = m5c
  variation 151: note = CpG site, residue is C if methylated or T(=U) if unmethylated
gttgggattatatatgtatattattatgttcggttaatttttatatttttggtagagataggggttttattatgttggttagggtggttttgaatttttgattttaggtgatttatttattttggttttttagagtgttgggattataggygtgagttattgtattcggtataaagttattttaaaatagttttttttttttttttgaaatagttttgttttgtagtttaggttggagtgtagtggtataattttagtttattgtaatttttatttttcgggtttaagtgatttttgtgt

SEQ ID NO: 70 - DNA, 300 bp, synthetic construct
  source 1..300: mol_type = other DNA
  modified_base 2: mod_base = OTHER; note = uracil
  modified_base 4: mod_base = OTHER; note = uracil
  modified_base 11: mod_base = OTHER; note = uracil
  modified_base 13: mod_base = OTHER; note = uracil
  modified_base 19..20: mod_base = OTHER; note = uracil
  modified_base 37: mod_base = OTHER; note = uracil
  modified_base 44: mod_base = OTHER; note = uracil
  modified_base 55..56: mod_base = OTHER; note = uracil
  modified_base 58: mod_base = OTHER; note = uracil
  modified_base 61: mod_base = OTHER; note = uracil
  modified_base 63: mod_base = OTHER; note = uracil
  modified_base 65..66: mod_base = OTHER; note = uracil
  modified_base 69..70: mod_base = OTHER; note = uracil
  modified_base 75: mod_base = OTHER; note = uracil
  modified_base 78: mod_base = OTHER; note = uracil
  modified_base 83: mod_base = OTHER; note = uracil
  modified_base 88: mod_base = OTHER; note = uracil
  modified_base 94: mod_base = OTHER; note = uracil
  modified_base 111: mod_base = OTHER; note = uracil
  modified_base 125: mod_base = OTHER; note = uracil
  modified_base 132: mod_base = OTHER; note = uracil
  modified_base 139: mod_base = OTHER; note = uracil
  modified_base 145: mod_base = OTHER; note = uracil
  modified_base 147: mod_base = OTHER; note = uracil
  modified_base 151..152: mod_base = OTHER; note = uracil
  modified_base 159..161: mod_base = OTHER; note = uracil
  modified_base 164: mod_base = OTHER; note = uracil
  modified_base 166: mod_base = OTHER; note = uracil
  modified_base 168: mod_base = OTHER; note = uracil
  modified_base 176..177: mod_base = OTHER; note = uracil
  modified_base 191: mod_base = OTHER; note = uracil
  modified_base 193..194: mod_base = OTHER; note = uracil
  modified_base 201: mod_base = OTHER; note = uracil
  modified_base 209: mod_base = OTHER; note = uracil
  modified_base 214..215: mod_base = OTHER; note = uracil
  modified_base 217..219: mod_base = OTHER; note = uracil
  modified_base 223..224: mod_base = OTHER; note = uracil
  modified_base 227: mod_base = OTHER; note = uracil
  modified_base 237..240: mod_base = OTHER; note = uracil
  modified_base 244: mod_base = OTHER; note = uracil
  modified_base 246: mod_base = OTHER; note = uracil
  modified_base 249..250: mod_base = OTHER; note = uracil
  modified_base 268: mod_base = OTHER; note = uracil
  modified_base 273: mod_base = OTHER; note = uracil
  modified_base 285: mod_base = OTHER; note = uracil
  modified_base 295..297: mod_base = OTHER; note = uracil
  modified_base 300: mod_base = OTHER; note = uracil
  modified_base 21: mod_base = m5c
  modified_base 133: mod_base = m5c
  modified_base 269: mod_base = m5c
  variation 149: note = CpG site, residue is C if methylated or T(=U) if unmethylated
gtataagaattatttgaattcggaaggtggaggttgtagtgagttgagattgtattattatattttagtttgggttatagggtaaggttgttttaaaaaaaaaaaaaaagttgttttaaaatggttttgtgtcgggtgtagtggtttaygtttgtaattttagtattttgggaggttaaggtgggtggattatttgaggttaggggtttaagattattttggttaatatggtggaatttttatttttattaaaaatataaaaattagtcgggtatggtggtgtgtatatataattttagt

SEQ ID NO: 71 - DNA, 300 bp, synthetic construct
  source 1..300: mol_type = other DNA
  modified_base 3: mod_base = OTHER; note = uracil
  modified_base 9..10: mod_base = OTHER; note = uracil
  modified_base 12: mod_base = OTHER; note = uracil
  modified_base 16..18: mod_base = OTHER; note = uracil
  modified_base 25: mod_base = OTHER; note = uracil
  modified_base 29: mod_base = OTHER; note = uracil
  modified_base 31..32: mod_base = OTHER; note = uracil
  modified_base 47..48: mod_base = OTHER; note = uracil
  modified_base 52: mod_base = OTHER; note = uracil
  modified_base 61: mod_base = OTHER; note = uracil
  modified_base 68: mod_base = OTHER; note = uracil
  modified_base 74..75: mod_base = OTHER; note = uracil
  modified_base 78..80: mod_base = OTHER; note = uracil
  modified_base 82: mod_base = OTHER; note = uracil
  modified_base 86: mod_base = OTHER; note = uracil
  modified_base 91..92: mod_base = OTHER; note = uracil
  modified_base 97..98: mod_base = OTHER; note = uracil
  modified_base 101..103: mod_base = OTHER; note = uracil
  modified_base 106..110: mod_base = OTHER; note = uracil
  modified_base 118..119: mod_base = OTHER; note = uracil
  modified_base 122..124: mod_base = OTHER; note = uracil
  modified_base 127..128: mod_base = OTHER; note = uracil
  modified_base 131: mod_base = OTHER; note = uracil
  modified_base 134: mod_base = OTHER; note = uracil
  modified_base 136..138: mod_base = OTHER; note = uracil
  modified_base 142..143: mod_base = OTHER; note = uracil
  modified_base 145: mod_base = OTHER; note = uracil
  modified_base 152: mod_base = OTHER; note = uracil
  modified_base 154: mod_base = OTHER; note = uracil
  modified_base 156: mod_base = OTHER; note = uracil
  modified_base 162: mod_base = OTHER; note = uracil
  modified_base 164: mod_base = OTHER; note = uracil
  modified_base 177: mod_base = OTHER; note = uracil
  modified_base 182: mod_base = OTHER; note = uracil
  modified_base 186: mod_base = OTHER; note = uracil
  modified_base 188: mod_base = OTHER; note = uracil
  modified_base 190: mod_base = OTHER; note = uracil
  modified_base 198: mod_base = OTHER; note = uracil
  modified_base 203..205: mod_base = OTHER; note = uracil
  modified_base 215..216: mod_base = OTHER; note = uracil
  modified_base 219: mod_base = OTHER; note = uracil
  modified_base 221: mod_base = OTHER; note = uracil
  modified_base 238..240: mod_base = OTHER; note = uracil
  modified_base 242: mod_base = OTHER; note = uracil
  modified_base 244..246: mod_base = OTHER; note = uracil
  modified_base 248..249: mod_base = OTHER; note = uracil
  modified_base 253..254: mod_base = OTHER; note = uracil
  modified_base 260..261: mod_base = OTHER; note = uracil
  modified_base 270: mod_base = OTHER; note = uracil
  modified_base 274: mod_base = OTHER; note = uracil
  modified_base 280..281: mod_base = OTHER; note = uracil
  modified_base 286..287: mod_base = OTHER; note = uracil
  modified_base 291..292: mod_base = OTHER; note = uracil
  modified_base 296: mod_base = OTHER; note = uracil
  modified_base 299: mod_base = OTHER; note = uracil
  modified_base 93: mod_base = m5c
  modified_base 112: mod_base = m5c
  modified_base 114: mod_base = m5c
  modified_base 120: mod_base = m5c
  modified_base 178: mod_base = m5c
  modified_base 209: mod_base = m5c
  modified_base 229: mod_base = m5c
  variation 150: note = CpG site, residue is C if methylated or T(=U) if unmethylated
aataaatgttataggttttaattgtaggttttaaggagttgagattttatattggggttgttggaggtagaagtttttttatttttaggattcggatttgttttttttttacgcggtttcgtttagttagttatattttggttatagagygtttataaaggtttagtgtgtgtatgtcgggttgatttatagtggttttgggtttaggcgaggatttttttagaggggcggaaggggtttttttttttttggttattttttatggggagtagttagtaattaggattatgttagatttta

SEQ ID NO: 72 - DNA, 300 bp, synthetic construct
  source 1..300: mol_type = other DNA
  modified_base 7: mod_base = OTHER; note = uracil
  modified_base 11: mod_base = OTHER; note = uracil
  modified_base 17..18: mod_base = OTHER; note = uracil
  modified_base 25: mod_base = OTHER; note = uracil
  modified_base 29: mod_base = OTHER; note = uracil
  modified_base 32: mod_base = OTHER; note = uracil
  modified_base 34..37: mod_base = OTHER; note = uracil
  modified_base 49..50: mod_base = OTHER; note = uracil
  modified_base 64..67: mod_base = OTHER; note = uracil
  modified_base 70: mod_base = OTHER; note = uracil
  modified_base 73..76: mod_base = OTHER; note = uracil
  modified_base 78: mod_base = OTHER; note = uracil
  modified_base 88..89: mod_base = OTHER; note = uracil
  modified_base 93..94: mod_base = OTHER; note = uracil
  modified_base 99..101: mod_base = OTHER; note = uracil
  modified_base 106..107: mod_base = OTHER; note = uracil
  modified_base 109: mod_base = OTHER; note = uracil
  modified_base 117: mod_base = OTHER; note = uracil
  modified_base 120..121: mod_base = OTHER; note = uracil
  modified_base 125: mod_base = OTHER; note = uracil
  modified_base 129: mod_base = OTHER; note = uracil
  modified_base 131: mod_base = OTHER; note = uracil
  modified_base 133: mod_base = OTHER; note = uracil
  modified_base 135: mod_base = OTHER; note = uracil
  modified_base 140..141: mod_base = OTHER; note = uracil
  modified_base 152: mod_base = OTHER; note = uracil
  modified_base 154: mod_base = OTHER; note = uracil
  modified_base 160..161: mod_base = OTHER; note = uracil
  modified_base 171: mod_base = OTHER; note = uracil
  modified_base 175: mod_base = OTHER; note = uracil
  modified_base 185: mod_base = OTHER; note = uracil
  modified_base 201: mod_base = OTHER; note = uracil
  modified_base 206: mod_base = OTHER; note = uracil
  modified_base 212..213: mod_base = OTHER; note = uracil
  modified_base 228: mod_base = OTHER; note = uracil
  modified_base 231: mod_base = OTHER; note = uracil
  modified_base 234..235: mod_base = OTHER; note = uracil
  modified_base 237..238: mod_base = OTHER; note = uracil
  modified_base 241: mod_base = OTHER; note = uracil
  modified_base 244..247: mod_base = OTHER; note = uracil
  modified_base 258: mod_base = OTHER; note = uracil
  modified_base 260: mod_base = OTHER; note = uracil
  modified_base 263: mod_base = OTHER; note = uracil
  modified_base 265..266: mod_base = OTHER; note = uracil
  modified_base 273..274: mod_base = OTHER; note = uracil
  modified_base 277: mod_base = OTHER; note = uracil
  modified_base 286..287: mod_base = OTHER; note = uracil
  modified_base 293: mod_base = OTHER; note = uracil
  modified_base 71: mod_base = m5c
  modified_base 91: mod_base = m5c
  modified_base 122: mod_base = m5c
  modified_base 180: mod_base = m5c
  modified_base 186: mod_base = m5c
  modified_base 188: mod_base = m5c
  modified_base 207: mod_base = m5c
  variation 150: note = CpG site, residue is C if methylated or T(=U) if unmethylated
tgaagtttggtatggttttggttattgattgttttttatggaaaatggttaggagggagagggtttttttcgtttttttgagaaggttttcgtttgggtttagaattattgtgagttagttcggtatatatatattgagtttttgtgagygttttgtggttagggtgtagttggttgggcgggatcgcgtgggggaagggtaggttcgggttttgaaagtgggaaggtttttgtttttagtaattttagtatggaattttaattttttggagtttgtaattagggtttgtggtatttgtt

SEQ ID NO: 73 - DNA, 300 bp, synthetic construct
  source 1..300: mol_type = other DNA
  modified_base 2: mod_base = OTHER; note = uracil
  modified_base 7: mod_base = OTHER; note = uracil
  modified_base 10: mod_base = OTHER; note = uracil
  modified_base 13: mod_base = OTHER; note = uracil
  modified_base 16: mod_base = OTHER; note = uracil
  modified_base 21..22: mod_base = OTHER; note = uracil
  modified_base 27: mod_base = OTHER; note = uracil
  modified_base 35: mod_base = OTHER; note = uracil
  modified_base 38: mod_base = OTHER; note = uracil
  modified_base 51: mod_base = OTHER; note = uracil
  modified_base 53..55: mod_base = OTHER; note = uracil
  modified_base 58: mod_base = OTHER; note = uracil
  modified_base 61..63: mod_base = OTHER; note = uracil
  modified_base 66..67: mod_base = OTHER; note = uracil
  modified_base 73: mod_base = OTHER; note = uracil
  modified_base 76: mod_base = OTHER; note = uracil
  modified_base 79: mod_base = OTHER; note = uracil
  modified_base 83..85: mod_base = OTHER; note = uracil
  modified_base 87: mod_base = OTHER; note = uracil
  modified_base 90: mod_base = OTHER; note = uracil
  modified_base 94..96: mod_base = OTHER; note = uracil
  modified_base 98: mod_base = OTHER; note = uracil
  modified_base 102..103: mod_base = OTHER; note = uracil
  modified_base 107..108: mod_base = OTHER; note = uracil
  modified_base 118: mod_base = OTHER; note = uracil
  modified_base 124: mod_base = OTHER; note = uracil
  modified_base 130: mod_base = OTHER; note = uracil
  modified_base 133: mod_base = OTHER; note = uracil
  modified_base 135: mod_base = OTHER; note = uracil
  modified_base 141: mod_base = OTHER; note = uracil
  modified_base 143: mod_base = OTHER; note = uracil
  modified_base 152: mod_base = OTHER; note = uracil
  modified_base 158: mod_base = OTHER; note = uracil
  modified_base 160: mod_base = OTHER; note = uracil
  modified_base 162..164: mod_base = OTHER; note = uracil
  modified_base 169: mod_base = OTHER; note = uracil
  modified_base 171: mod_base = OTHER; note = uracil
  modified_base 176..178: mod_base = OTHER; note = uracil
  modified_base 181..182: mod_base = OTHER; note = uracil
  modified_base 190: mod_base = OTHER; note = uracil
  modified_base 193: mod_base = OTHER; note = uracil
  modified_base 204..205: mod_base = OTHER; note = uracil
  modified_base 207..208: mod_base = OTHER; note = uracil
  modified_base 210: mod_base = OTHER; note = uracil
  modified_base 215: mod_base = OTHER; note = uracil
  modified_base 219: mod_base = OTHER; note = uracil
  modified_base 223..224: mod_base = OTHER; note = uracil
  modified_base 229: mod_base = OTHER; note = uracil
  modified_base 232..233: mod_base = OTHER; note = uracil
  modified_base 238: mod_base = OTHER; note = uracil
  modified_base 241..242: mod_base = OTHER; note = uracil
  modified_base 245: mod_base = OTHER; note = uracil
  modified_base 247: mod_base = OTHER; note = uracil
  modified_base 252..253: mod_base = OTHER; note = uracil
  modified_base 256..257: mod_base = OTHER; note = uracil
  modified_base 259: mod_base = OTHER; note = uracil
  modified_base 267..270: mod_base = OTHER; note = uracil
  modified_base 273: mod_base = OTHER; note = uracil
  modified_base 276: mod_base = OTHER; note = uracil
  modified_base 278: mod_base = OTHER; note = uracil
  modified_base 282: mod_base = OTHER; note = uracil
  modified_base 284..285: mod_base = OTHER; note = uracil
  modified_base 287: mod_base = OTHER; note = uracil
  modified_base 289: mod_base = OTHER; note = uracil
  modified_base 292: mod_base = OTHER; note = uracil
  modified_base 294: mod_base = OTHER; note = uracil
  modified_base 298: mod_base = OTHER; note = uracil
  modified_base 28: mod_base = m5c
  modified_base 126: mod_base = m5c
  modified_base 201: mod_base = m5c
  modified_base 221: mod_base = m5c
  modified_base 236: mod_base = m5c
  modified_base 279: mod_base = m5c
  variation 149: note = CpG site, residue is C if methylated or T(=U) if unmethylated
gtagtgttataatattaatgttaaggtcgtggggtagttgatggtttgggtttttaattttttagttaggtgtttttgtaggtttatattttgtttattggttaaatttttaaataattttgattcgggttatttttatgtttaaagaygttaggggtttttttaaatttttttattttgttagaaagttttttatagtacggtttttatttagtttttacgtttgattttttatcgtattttgtttataatttgttattagtgaatttttgttgtttcggttttatattttttatgttg

SEQ ID NO: 74 - DNA, 300 bp, synthetic construct
  source 1..300: mol_type = other DNA
  modified_base 3: mod_base = OTHER; note = uracil
  modified_base 19: mod_base = OTHER; note = uracil
  modified_base 25: mod_base = OTHER; note = uracil
  modified_base 28: mod_base = OTHER; note = uracil
  modified_base 36: mod_base = OTHER; note = uracil
  modified_base 38: mod_base = OTHER; note = uracil
  modified_base 45: mod_base = OTHER; note = uracil
  modified_base 56: mod_base = OTHER; note = uracil
  modified_base 74: mod_base = OTHER; note = uracil
  modified_base 86: mod_base = OTHER; note = uracil
  modified_base 97: mod_base = OTHER; note = uracil
  modified_base 102: mod_base = OTHER; note = uracil
  modified_base 112: mod_base = OTHER; note = uracil
  modified_base 116: mod_base = OTHER; note = uracil
  modified_base 120: mod_base = OTHER; note = uracil
  modified_base 143..146: mod_base = OTHER; note = uracil
  modified_base 153: mod_base = OTHER; note = uracil
  modified_base 160: mod_base = OTHER; note = uracil
  modified_base 171..172: mod_base = OTHER; note = uracil
  modified_base 178: mod_base = OTHER; note = uracil
  modified_base 199..200: mod_base = OTHER; note = uracil
  modified_base 207: mod_base = OTHER; note = uracil
  modified_base 218..219: mod_base = OTHER; note = uracil
  modified_base 222: mod_base = OTHER; note = uracil
  modified_base 228: mod_base = OTHER; note = uracil
  modified_base 230..231: mod_base = OTHER; note = uracil
  modified_base 235: mod_base = OTHER; note = uracil
  modified_base 250..252: mod_base = OTHER; note = uracil
  modified_base 256..257: mod_base = OTHER; note = uracil
  modified_base 260: mod_base = OTHER; note = uracil
  modified_base 263: mod_base = OTHER; note = uracil
  modified_base 266..269: mod_base = OTHER; note = uracil
  modified_base 274..275: mod_base = OTHER; note = uracil
  modified_base 280: mod_base = OTHER; note = uracil
  modified_base 294: mod_base = OTHER; note = uracil
  modified_base 296: mod_base = OTHER; note = uracil
  modified_base 299..300: mod_base = OTHER; note = uracil
  modified_base 20: mod_base = m5c
  modified_base 63: mod_base = m5c
  modified_base 78: mod_base = m5c
  modified_base 98: mod_base = m5c
  modified_base 173: mod_base = m5c
  modified_base 271: mod_base = m5c
  variation 150: note = CpG site, residue is C if methylated or T(=U) if unmethylated
agtatgagaagtgtggagtcggagtagtaggggtttattagtggtaggttatgagtaggatgcgatggaagattaggcgtgaaagttaagtggaggtcgtattatagaagattttttggtagggtaaagagatttgggagagtttttgaygtttttgagtataagagtagttcgagttaaagttatttaaaggtttggttagtgggtaagatgtgggtttgtagaagtatttggttgggaagttgggagtttaaattattagttgttttacggttttggtattgatgttgtagtattgtt

SEQ ID NO: 75 - DNA, 300 bp, synthetic construct
  source 1..300: mol_type = other DNA
  modified_base 27: mod_base = OTHER; note = uracil
  modified_base 41: mod_base = OTHER; note = uracil
  modified_base 43: mod_base = OTHER; note = uracil
  modified_base 46: mod_base = OTHER; note = uracil
  modified_base 55: mod_base = OTHER; note = uracil
  modified_base 61: mod_base = OTHER; note = uracil
  modified_base 84: mod_base = OTHER; note = uracil
  modified_base 89: mod_base = OTHER; note = uracil
  modified_base 110..111: mod_base = OTHER; note = uracil
  modified_base 118: mod_base = OTHER; note = uracil
  modified_base 120..121: mod_base = OTHER; note = uracil
  modified_base 133..134: mod_base = OTHER; note = uracil
  modified_base 136: mod_base = OTHER; note = uracil
  modified_base 139..141: mod_base = OTHER; note = uracil
  modified_base 144: mod_base = OTHER; note = uracil
  modified_base 157: mod_base = OTHER; note = uracil
  modified_base 166..167: mod_base = OTHER; note = uracil
  modified_base 171..173: mod_base = OTHER; note = uracil
  modified_base 176: mod_base = OTHER; note = uracil
  modified_base 180: mod_base = OTHER; note = uracil
  modified_base 193: mod_base = OTHER; note = uracil
  modified_base 203..204: mod_base = OTHER; note = uracil
  modified_base 209: mod_base = OTHER; note = uracil
  modified_base 216..217: mod_base = OTHER; note = uracil
  modified_base 219: mod_base = OTHER; note = uracil
  modified_base 231: mod_base = OTHER; note = uracil
  modified_base 233: mod_base = OTHER; note = uracil
  modified_base 235: mod_base = OTHER; note = uracil
  modified_base 244: mod_base = OTHER; note = uracil
  modified_base 250: mod_base = OTHER; note = uracil
  modified_base 257..258: mod_base = OTHER; note = uracil
  modified_base 275: mod_base = OTHER; note = uracil
  modified_base 277: mod_base = OTHER; note = uracil
  modified_base 287..288: mod_base = OTHER; note = uracil
  modified_base 297: mod_base = OTHER; note = uracil
  modified_base 9: mod_base = m5c
  modified_base 18: mod_base = m5c
  modified_base 44: mod_base = m5c
  modified_base 94: mod_base = m5c
  modified_base 112: mod_base = m5c
  modified_base 168: mod_base = m5c
  modified_base 174: mod_base = m5c
  modified_base 198: mod_base = m5c
  modified_base 206: mod_base = m5c
  modified_base 214: mod_base = m5c
  modified_base 251: mod_base = m5c
  modified_base 263: mod_base = m5c
  modified_base 279: mod_base = m5c
  variation 150: note = CpG site, residue is C if methylated or T(=U) if unmethylated
aggagggacgtggaagtcgtgggtggtagagaaaagtgtgtatcgttgggaggtttattttaagaataggttgggatgagaaatatgtttgggcgaggggggtgggaggttcggtgttatttgtggatggatttatagttttgtaattgygtgttgtaaagtttgttcggtttcgtatttattttgaaggtttttggcgatgtttcgatttttcgttttaaagaagtgagtttttataaggtttagaggtcgggagttaaagcgggagtgaagattttcgaggggtttaaatgaagtaga

SEQ ID NO: 76 - DNA, 300 bp, synthetic construct
  source 1..300: mol_type = other DNA
  modified_base 2: mod_base = OTHER; note = uracil
  modified_base 5: mod_base = OTHER; note = uracil
  modified_base 8: mod_base = OTHER; note = uracil
  modified_base 16..19: mod_base = OTHER; note = uracil
  modified_base 28: mod_base = OTHER; note = uracil
  modified_base 31: mod_base = OTHER; note = uracil
  modified_base 33: mod_base = OTHER; note = uracil
  modified_base 35..36: mod_base = OTHER; note = uracil
  modified_base 39: mod_base = OTHER; note = uracil
  modified_base 45: mod_base = OTHER; note = uracil
  modified_base 47..48: mod_base = OTHER; note = uracil
  modified_base 52..53: mod_base = OTHER; note = uracil
  modified_base 55: mod_base = OTHER; note = uracil
  modified_base 60..61: mod_base = OTHER; note = uracil
  modified_base 71: mod_base = OTHER; note = uracil
  modified_base 73: mod_base = OTHER; note = uracil
  modified_base 75: mod_base = OTHER; note = uracil
  modified_base 78: mod_base = OTHER; note = uracil
  modified_base 99: mod_base = OTHER; note = uracil
  modified_base 104..105: mod_base = OTHER; note = uracil
  modified_base 111..112: mod_base = OTHER; note = uracil
  modified_base 115: mod_base = OTHER; note = uracil
  modified_base 131: mod_base = OTHER; note = uracil
  modified_base 136: mod_base = OTHER; note = uracil
  modified_base 140: mod_base = OTHER; note = uracil
  modified_base 145: mod_base = OTHER; note = uracil
  modified_base 148: mod_base = OTHER; note = uracil
  modified_base 152: mod_base = OTHER; note = uracil
  modified_base 158: mod_base = OTHER; note = uracil
  modified_base 163: mod_base = OTHER; note = uracil
  modified_base 171..172: mod_base = OTHER; note = uracil
  modified_base 175..176: mod_base = OTHER; note = uracil
  modified_base 178: mod_base = OTHER; note = uracil
  modified_base 185: mod_base = OTHER; note = uracil
  modified_base 187: mod_base = OTHER; note = uracil
  modified_base 192..193: mod_base = OTHER; note = uracil
  modified_base 195..197: mod_base = OTHER; note = uracil
  modified_base 199..204: mod_base = OTHER; note = uracil
  modified_base 208..210: mod_base = OTHER; note = uracil
  modified_base 214: mod_base = OTHER; note = uracil
  modified_base 221: mod_base = OTHER; note = uracil
  modified_base 223: mod_base = OTHER; note = uracil
  modified_base 226..228: mod_base = OTHER; note = uracil
  modified_base 231..232: mod_base = OTHER; note = uracil
  modified_base 237: mod_base = OTHER; note = uracil
  modified_base 248..249: mod_base = OTHER; note = uracil
  modified_base 251..253: mod_base = OTHER; note = uracil
  modified_base 261: mod_base = OTHER; note = uracil
  modified_base 263: mod_base = OTHER; note = uracil
  modified_base 265: mod_base = OTHER; note = uracil
  modified_base 270: mod_base = OTHER; note = uracil
  modified_base 272: mod_base = OTHER; note = uracil
  modified_base 275..276: mod_base = OTHER; note = uracil
  modified_base 278..280: mod_base = OTHER; note = uracil
  modified_base 285: mod_base = OTHER; note = uracil
  modified_base 288..289: mod_base = OTHER; note = uracil
  modified_base 294..296: mod_base = OTHER; note = uracil
  modified_base 298..299: mod_base = OTHER; note = uracil
  modified_base 21: mod_base = m5c
  modified_base 37: mod_base = m5c
  modified_base 49: mod_base = m5c
  modified_base 86: mod_base = m5c
  modified_base 94: mod_base = m5c
  modified_base 102: mod_base = m5c
  modified_base 126: mod_base = m5c
  modified_base 132: mod_base = m5c
  modified_base 188: mod_base = m5c
  modified_base 206: mod_base = m5c
  modified_base 256: mod_base = m5c
  modified_base 282: mod_base = m5c
  modified_base 291: mod_base = m5c
  variation 150: note = CpG site, residue is C if methylated or T(=U) if unmethylated
tttgttttatttggatttttcgagagtttttattttcgttttggttttcggtttttgaattttatgagagtttatttttttgaggcgaaaagtcgaggtatcgttaagaatttttaaaatgaatgcggggtcgggtaaattttgtaataygtaattgtagggttgtggatttatttataggtgatatcgggttttttatttttttcgtttagatatgttttttattttaatttatttttgaaatagattttttagcggtgtatatttttttttgttatttacgatttttacgtttttttt

SEQ ID NO: 77 - DNA, 300 bp, synthetic construct
  source 1..300: mol_type = other DNA
  modified_base 1..2: mod_base = OTHER; note = uracil
  modified_base 10..11: mod_base = OTHER; note = uracil
  modified_base 20..22: mod_base = OTHER; note = uracil
  modified_base 25..27: mod_base = OTHER; note = uracil
  modified_base 31..32: mod_base = OTHER; note = uracil
  modified_base 37: mod_base = OTHER; note = uracil
  modified_base 47: mod_base = OTHER; note = uracil
  modified_base 60..62: mod_base = OTHER; note = uracil
  modified_base 64: mod_base = OTHER; note = uracil
  modified_base 68..69: mod_base = OTHER; note = uracil
  modified_base 71: mod_base = OTHER; note = uracil
  modified_base 74: mod_base = OTHER; note = uracil
  modified_base 76..79: mod_base = OTHER; note = uracil
  modified_base 81..82: mod_base = OTHER; note = uracil
  modified_base 88: mod_base = OTHER; note = uracil
  modified_base 93: mod_base = OTHER; note = uracil
  modified_base 95: mod_base = OTHER; note = uracil
  modified_base 99: mod_base = OTHER; note = uracil
  modified_base 101: mod_base = OTHER; note = uracil
  modified_base 111: mod_base = OTHER; note = uracil
  modified_base 113: mod_base = OTHER; note = uracil
  modified_base 115: mod_base = OTHER; note = uracil
  modified_base 118..119: mod_base = OTHER; note = uracil
  modified_base 123..124: mod_base = OTHER; note = uracil
  modified_base 126..128: mod_base = OTHER; note = uracil
  modified_base 133: mod_base = OTHER; note = uracil
  modified_base 135..136: mod_base = OTHER; note = uracil
  modified_base 138..139: mod_base = OTHER; note = uracil
  modified_base 141..142: mod_base = OTHER; note = uracil
  modified_base 145..146: mod_base = OTHER; note = uracil
  modified_base 148: mod_base = OTHER; note = uracil
  modified_base 151..154: mod_base = OTHER; note = uracil
  modified_base 163..165: mod_base = OTHER; note = uracil
  modified_base 171..173: mod_base = OTHER; note = uracil
  modified_base 176..177: mod_base = OTHER; note = uracil
  modified_base 182: mod_base = OTHER; note = uracil
  modified_base 187..188: mod_base = OTHER; note = uracil
  modified_base 191: mod_base = OTHER; note = uracil
  modified_base 194..195: mod_base = OTHER; note = uracil
  modified_base 198..199: mod_base = OTHER; note = uracil
  modified_base 202..203: mod_base = OTHER; note = uracil
  modified_base 226: mod_base = OTHER; note = uracil
  modified_base 244: mod_base = OTHER; note = uracil
  modified_base 250..251: mod_base = OTHER; note = uracil
  modified_base 262: mod_base = OTHER; note = uracil
  modified_base 264..265: mod_base = OTHER; note = uracil
  modified_base 267..268: mod_base = OTHER; note = uracil
  modified_base 274: mod_base = OTHER; note = uracil
  modified_base 277: mod_base = OTHER; note = uracil
  modified_base 280..281: mod_base = OTHER; note = uracil
  modified_base 283: mod_base = OTHER; note = uracil
  modified_base 287..288: mod_base = OTHER; note = uracil
  modified_base 291..293: mod_base = OTHER; note = uracil
  modified_base 298: mod_base = OTHER; note = uracil
  modified_base 300: mod_base = OTHER; note = uracil
  modified_base 15: mod_base = m5c
  modified_base 65: mod_base = m5c
  modified_base 205: mod_base = m5c
  modified_base 218: mod_base = m5c
  modified_base 220: mod_base = m5c
  modified_base 269: mod_base = m5c
  modified_base 278: mod_base = m5c
  variation 149: note = CpG site, residue is C if methylated or T(=U) if unmethylated
  variation 247: note = CpG site, residue is C if methylated or T(=U) if unmethylated
tttttttgatttggcgagttttttttttttttattttattttattgttttttattgttttttttcggttttttttttttttttaggttttttttttagtttagtttggagtttatattttttttattttttttattttttttttttttygttttaggattatttttgggatttattttgagttgagtttatagttagttagttacgaaatagaggtgcgcgggggtagggtggtatggagattttgyggtttttgatttgatatttttcggagttatcgttataggtttgtttattttat

SEQ ID NO: 78 - DNA, 300 bp, synthetic construct
  source 1..300: mol_type = other DNA
  modified_base 10: mod_base = OTHER; note = uracil
  modified_base 14..15: mod_base = OTHER; note = uracil
  modified_base 27: mod_base = OTHER; note = uracil
  modified_base 29: mod_base = OTHER; note = uracil
  modified_base 40: mod_base = OTHER; note = uracil
  modified_base 45: mod_base = OTHER; note = uracil
  modified_base 51: mod_base = OTHER; note = uracil
  modified_base 54: mod_base = OTHER; note = uracil
  modified_base 60: mod_base = OTHER; note = uracil
  modified_base 62..63: mod_base = OTHER; note = uracil
  modified_base 67..68: mod_base = OTHER; note = uracil
  modified_base 70..72: mod_base = OTHER; note = uracil
  modified_base 75..78: mod_base = OTHER; note = uracil
  modified_base 83: mod_base = OTHER; note = uracil
  modified_base 85..86: mod_base = OTHER; note = uracil
  modified_base 88: mod_base = OTHER; note = uracil
  modified_base 99: mod_base = OTHER; note = uracil
  modified_base 103: mod_base = OTHER; note = uracil
  modified_base 107: mod_base = OTHER; note = uracil
  modified_base 114: mod_base = OTHER; note = uracil
  modified_base 116: mod_base = OTHER; note = uracil
  modified_base 119: mod_base = OTHER; note = uracil
  modified_base 121: mod_base = OTHER; note = uracil
  modified_base 131..133: mod_base = OTHER; note = uracil
  modified_base 143..144: mod_base = OTHER; note = uracil
  modified_base 190: mod_base = OTHER; note = uracil
  modified_base 192..193: mod_base = OTHER; note = uracil
  modified_base 197: mod_base = OTHER; note = uracil
  modified_base 202: mod_base = OTHER; note = uracil
  modified_base 214..215: mod_base = OTHER; note = uracil
  modified_base 233: mod_base = OTHER; note = uracil
  modified_base 244: mod_base = OTHER; note = uracil
  modified_base 254: mod_base = OTHER; note = uracil
  modified_base 282: mod_base = OTHER; note = uracil
  modified_base 286..287: mod_base = OTHER; note = uracil
  modified_base 292: mod_base = OTHER; note = uracil
  modified_base 300: mod_base = OTHER; note = uracil
  modified_base 21: mod_base = m5c
  modified_base 30: mod_base = m5c
  modified_base 79: mod_base = m5c
  modified_base 81: mod_base = m5c
  modified_base 94: mod_base = m5c
  modified_base 234: mod_base = m5c
  modified_base 284: mod_base = m5c
  variation 52: note = CpG site, residue is C if methylated or T(=U) if unmethylated
  variation 150: note = CpG site, residue is C if methylated or T(=U) if unmethylated
tgaaatgggtaggtttgtggcggtagtttcgggaggtgttaaattaaaggtygtagaatttttatattattttgttttcgcgtatttttatttcgtggttggttggttgtaggtttagtttaggatgggttttagggataattttggggyggaggaaggaggaggtgaaaagggtggaaaggatgtgagttttaaattgagttagagaaaagatttaggaggggagaagaggtcggagggaaataataaaaagtaataaaatgaaatggaaagggaagggattcgttaggttaaaaaggt

SEQ ID NO: 79 - DNA, 300 bp, synthetic construct
  source 1..300: mol_type = other DNA
  modified_base 2: mod_base = OTHER; note = uracil
  modified_base 4: mod_base = OTHER; note = uracil
  modified_base 14: mod_base = OTHER; note = uracil
  modified_base 16: mod_base = OTHER; note = uracil
  modified_base 18: mod_base = OTHER; note = uracil
  modified_base 21..22: mod_base = OTHER; note = uracil
  modified_base 26..27: mod_base = OTHER; note = uracil
  modified_base 29..31: mod_base = OTHER; note = uracil
  modified_base 36: mod_base = OTHER; note = uracil
  modified_base 38..39: mod_base = OTHER; note = uracil
  modified_base 41..42: mod_base = OTHER; note = uracil
  modified_base 44..45: mod_base = OTHER; note = uracil
  modified_base 48..49: mod_base = OTHER; note = uracil
  modified_base 51: mod_base = OTHER; note = uracil
  modified_base 54..57: mod_base = OTHER; note = uracil
  modified_base 66..68: mod_base = OTHER; note = uracil
  modified_base 74..76: mod_base = OTHER; note = uracil
  modified_base 79..80: mod_base = OTHER; note = uracil
  modified_base 85: mod_base = OTHER; note = uracil
  modified_base 90..91: mod_base = OTHER; note = uracil
  modified_base 94: mod_base = OTHER; note = uracil
  modified_base 97..98: mod_base = OTHER; note = uracil
  modified_base 101..102: mod_base = OTHER; note = uracil
  modified_base 105..106: mod_base = OTHER; note = uracil
  modified_base 129: mod_base = OTHER; note = uracil
  modified_base 147: mod_base = OTHER; note = uracil
  modified_base 153..154: mod_base = OTHER; note = uracil
  modified_base 165: mod_base = OTHER; note = uracil
  modified_base 167..168: mod_base = OTHER; note = uracil
  modified_base 170..171: mod_base = OTHER; note = uracil
  modified_base 177: mod_base = OTHER; note = uracil
  modified_base 180: mod_base = OTHER; note = uracil
  modified_base 183..184: mod_base = OTHER; note = uracil
  modified_base 186: mod_base = OTHER; note = uracil
  modified_base 190..191: mod_base = OTHER; note = uracil
  modified_base 194..196: mod_base = OTHER; note = uracil
  modified_base 201: mod_base = OTHER; note = uracil
  modified_base 203..204: mod_base = OTHER; note = uracil
  modified_base 207: mod_base = OTHER; note = uracil
  modified_base 219: mod_base = OTHER; note = uracil
  modified_base 225: mod_base = OTHER; note = uracil
  modified_base 228: mod_base = OTHER; note = uracil
  modified_base 250: mod_base = OTHER; note = uracil
  modified_base 252: mod_base = OTHER; note = uracil
  modified_base 254: mod_base = OTHER; note = uracil
  modified_base 260..261: mod_base = OTHER; note = uracil
  modified_base 266: mod_base = OTHER; note = uracil
  modified_base 278: mod_base = OTHER; note = uracil
  modified_base 286: mod_base = OTHER; note = uracil
  modified_base 289..290: mod_base = OTHER; note = uracil
  modified_base 296: mod_base = OTHER; note = uracil
  modified_base 299: mod_base = OTHER; note = uracil
  modified_base 108: mod_base = m5c
  modified_base 121: mod_base = m5c
  modified_base 123: mod_base = m5c
  modified_base 172: mod_base = m5c
  modified_base 208: mod_base = m5c
  variation 52: note = CpG site, residue is C if methylated or T(=U) if unmethylated
  variation 150: note = CpG site, residue is C if methylated or T(=U) if unmethylated
  variation 181: note = CpG site, residue is C if methylated or T(=U) if unmethylated
gtttagtttggagtttatattttttttattttttttattttttttttttttygttttaggattatttttgggatttattttgagttgagtttatagttagttagttacgaaatagaggtgcgcgggggtagggtggtatggagattttgyggtttttgatttgatatttttcggagttatygttataggtttgtttattttatttgtcgggaagataattttggtttttggtggtgggtgggtgattgatttttaaaatttaaagtattggttttttttgggttattttttatgattgtt

SEQ ID NO: 80 - DNA, 300 bp, synthetic construct
  source 1..300: mol_type = other DNA
  modified_base 3: mod_base = OTHER; note = uracil
  modified_base 7: mod_base = OTHER; note = uracil
  modified_base 19..21: mod_base = OTHER; note = uracil
  modified_base 30..31: mod_base = OTHER; note = uracil
  modified_base 36: mod_base = OTHER; note = uracil
  modified_base 53: mod_base = OTHER; note = uracil
  modified_base 57: mod_base = OTHER; note = uracil
  modified_base 59..61: mod_base = OTHER; note = uracil
  modified_base 63..65: mod_base = OTHER; note = uracil
  modified_base 67..68: mod_base = OTHER; note = uracil
  modified_base 70..71: mod_base = OTHER; note = uracil
  modified_base 77..78: mod_base = OTHER; note = uracil
  modified_base 87: mod_base = OTHER; note = uracil
  modified_base 90..91: mod_base = OTHER; note = uracil
  modified_base 95: mod_base = OTHER; note = uracil
  modified_base 108: mod_base = OTHER; note = uracil
  modified_base 112..113: mod_base = OTHER; note = uracil
  modified_base 125: mod_base = OTHER; note = uracil
  modified_base 127: mod_base = OTHER; note = uracil
  modified_base 138: mod_base = OTHER; note = uracil
  modified_base 143: mod_base = OTHER; note = uracil
  modified_base 149: mod_base = OTHER; note = uracil
  modified_base 152: mod_base = OTHER; note = uracil
  modified_base 158: mod_base = OTHER; note = uracil
  modified_base 160..161: mod_base = OTHER; note = uracil
  modified_base 165..166: mod_base = OTHER; note = uracil
  modified_base 168..170: mod_base = OTHER; note = uracil
  modified_base 173..176: mod_base = OTHER; note = uracil
  modified_base 181: mod_base = OTHER; note = uracil
  modified_base 183..184: mod_base = OTHER; note = uracil
  modified_base 186: mod_base = OTHER; note = uracil
  modified_base 197: mod_base = OTHER; note = uracil
  modified_base 201: mod_base = OTHER; note = uracil
  modified_base 205: mod_base = OTHER; note = uracil
  modified_base 212: mod_base = OTHER; note = uracil
  modified_base 214: mod_base = OTHER; note = uracil
  modified_base 217: mod_base = OTHER; note = uracil
  modified_base 219: mod_base = OTHER; note = uracil
  modified_base 229..231: mod_base = OTHER; note = uracil
  modified_base 241..242: mod_base = OTHER; note = uracil
  modified_base 288: mod_base = OTHER; note = uracil
  modified_base 290..291: mod_base = OTHER; note = uracil
  modified_base 295: mod_base = OTHER; note = uracil
  modified_base 300: mod_base = OTHER; note = uracil
  modified_base 92: mod_base = m5c
  modified_base 128: mod_base = m5c
  modified_base 177: mod_base = m5c
  modified_base 179: mod_base = m5c
  modified_base 192: mod_base = m5c
  variation 119: note = CpG site, residue is C if methylated or T(=U) if unmethylated
  variation 150: note = CpG site, residue is C if methylated or T(=U) if unmethylated
  variation 248: note = CpG site, residue is C if methylated or T(=U) if unmethylated
agtagttataggaagtaatttagaaaaaattaatgttttggattttgagagttaattatttatttattattagaagttaaagttattttttcggtaggtgaaatgggtaggtttgtggyggtagtttcgggaggtgttaaattaaaggtygtagaatttttatattattttgttttcgcgtatttttatttcgtggttggttggttgtaggtttagtttaggatgggttttagggataattttggggyggaggaaggaggaggtgaaaagggtggaaaggatgtgagttttaaattgagt

SEQ ID NO: 81 - DNA, 300 bp, synthetic construct
  source 1..300: mol_type = other DNA
  modified_base 1: mod_base = OTHER; note = uracil
  modified_base 5..6: mod_base = OTHER; note = uracil
  modified_base 9: mod_base = OTHER; note = uracil
  modified_base 12: mod_base = OTHER; note = uracil
  modified_base 15: mod_base = OTHER; note = uracil
  modified_base 18..19: mod_base = OTHER; note = uracil
  modified_base 23: mod_base = OTHER; note = uracil
  modified_base 25: mod_base = OTHER; note = uracil
  modified_base 47..48: mod_base = OTHER; note = uracil
  modified_base 54..55: mod_base = OTHER; note = uracil
  modified_base 58: mod_base = OTHER; note = uracil
  modified_base 60..61: mod_base = OTHER; note = uracil
  modified_base 66: mod_base = OTHER; note = uracil
  modified_base 69: mod_base = OTHER; note = uracil
  modified_base 75..76: mod_base = OTHER; note = uracil
  modified_base 78: mod_base = OTHER; note = uracil
  modified_base 86: mod_base = OTHER; note = uracil
  modified_base 91: mod_base = OTHER; note = uracil
  modified_base 114: mod_base = OTHER; note = uracil
  modified_base 116: mod_base = OTHER; note = uracil
  modified_base 133..134: mod_base = OTHER; note = uracil
  modified_base 139: mod_base = OTHER; note = uracil
  modified_base 143: mod_base = OTHER; note = uracil
  modified_base 148: mod_base = OTHER; note = uracil
  modified_base 157: mod_base = OTHER; note = uracil
  modified_base 163: mod_base = OTHER; note = uracil
  modified_base 166..167: mod_base = OTHER; note = uracil
  modified_base 176..178: mod_base = OTHER; note = uracil
  modified_base 182: mod_base = OTHER; note = uracil
  modified_base 185: mod_base = OTHER; note = uracil
  modified_base 188: mod_base = OTHER; note = uracil
  modified_base 198: mod_base = OTHER; note = uracil
  modified_base 204: mod_base = OTHER; note = uracil
  modified_base 211: mod_base = OTHER; note = uracil
  modified_base 218..219: mod_base = OTHER; note = uracil
  modified_base 222..224: mod_base = OTHER; note = uracil
  modified_base 227..228: mod_base = OTHER; note = uracil
  modified_base 237..239: mod_base = OTHER; note = uracil
  modified_base 242: mod_base = OTHER; note = uracil
  modified_base 244..246: mod_base = OTHER; note = uracil
  modified_base 250..251: mod_base = OTHER; note = uracil
  modified_base 254..256: mod_base = OTHER; note = uracil
  modified_base 259: mod_base = OTHER; note = uracil
  modified_base 265..268: mod_base = OTHER; note = uracil
  modified_base 273: mod_base = OTHER; note = uracil
  modified_base 275: mod_base = OTHER; note = uracil
  modified_base 278: mod_base = OTHER; note = uracil
  modified_base 280: mod_base = OTHER; note = uracil
  modified_base 283..284: mod_base = OTHER; note = uracil
  modified_base 287..288: mod_base = OTHER; note = uracil
  modified_base 291: mod_base = OTHER; note = uracil
  modified_base 296: mod_base = OTHER; note = uracil
  modified_base 299: mod_base = OTHER; note = uracil
  modified_base 32: mod_base = m5c
  modified_base 70: mod_base = m5c
  modified_base 79: mod_base = m5c
  modified_base 82: mod_base = m5c
  modified_base 103: mod_base = m5c
  modified_base 129: mod_base = m5c
  modified_base 131: mod_base = m5c
  modified_base 136: mod_base = m5c
  modified_base 149: mod_base = m5c
  modified_base 155: mod_base = m5c
  modified_base 179: mod_base = m5c
  modified_base 186: mod_base = m5c
  modified_base 199: mod_base = m5c
  modified_base 213: mod_base = m5c
  modified_base 220: mod_base = m5c
  modified_base 225: mod_base = m5c
  modified_base 230: mod_base = m5c
  modified_base 233: mod_base = m5c
  modified_base 240: mod_base = m5c
  modified_base 252: mod_base = m5c
  modified_base 257: mod_base = m5c
  modified_base 263: mod_base = m5c
  modified_base 269: mod_base = m5c
  modified_base 271: mod_base = m5c
  modified_base 281: mod_base = m5c
  modified_base 285: mod_base = m5c
  modified_base 289: mod_base = m5c
  modified_base 292: mod_base = m5c
  variation 151: note = CpG site, residue is C if methylated or T(=U) if unmethylated
tattttaatttttgtaattatgtatagtgatcgatatttataattattttttttttttattatggtaatcgggtttttcgacgagtaggattgaagaaggaacgaggaataaattttgggagtggaagcgcgtttcggtagatagattcgygggcgttggggtagttaggagaagtttcggtattcgtttgtgaggttcggggttgtggtttcgagtttcgtttcgtttcggcgggtttcgtttttatgttcgtttcgttatcgttttcgcgttttttttcgttcgttcgtcgagttgta

SEQ ID NO: 82 - DNA, 300 bp, synthetic construct
  source 1..300: mol_type = other DNA
  modified_base 3: mod_base = OTHER; note = uracil
  modified_base 6: mod_base = OTHER; note = uracil
  modified_base 52: mod_base = OTHER; note = uracil
  modified_base 65..66: mod_base = OTHER; note = uracil
  modified_base 69: mod_base = OTHER; note = uracil
  modified_base 85: mod_base = OTHER; note = uracil
  modified_base 92..93: mod_base = OTHER; note = uracil
  modified_base 95: mod_base = OTHER; note = uracil
  modified_base 98..100: mod_base = OTHER; note = uracil
  modified_base 105..106: mod_base = OTHER; note = uracil
  modified_base 108: mod_base = OTHER; note = uracil
  modified_base 110: mod_base = OTHER; note = uracil
  modified_base 120: mod_base = OTHER; note = uracil
  modified_base 126: mod_base = OTHER; note = uracil
  modified_base 129: mod_base = OTHER; note = uracil
  modified_base 131..132: mod_base = OTHER; note = uracil
  modified_base 136: mod_base = OTHER; note = uracil
  modified_base 139..142: mod_base = OTHER; note = uracil
  modified_base 147..148: mod_base = OTHER; note = uracil
  modified_base 156: mod_base = OTHER; note = uracil
  modified_base 160: mod_base = OTHER; note = uracil
  modified_base 163: mod_base = OTHER; note = uracil
  modified_base 173: mod_base = OTHER; note = uracil
  modified_base 176..177: mod_base = OTHER; note = uracil
  modified_base 179: mod_base = OTHER; note = uracil
  modified_base 181..183: mod_base = OTHER; note = uracil
  modified_base 194..195: mod_base = OTHER; note = uracil
  modified_base 201..202: mod_base = OTHER; note = uracil
  modified_base 205: mod_base = OTHER; note = uracil
  modified_base 208: mod_base = OTHER; note = uracil
  modified_base 212..213: mod_base = OTHER; note = uracil
  modified_base 216: mod_base = OTHER; note = uracil
  modified_base 228..229: mod_base = OTHER; note = uracil
  modified_base 236..237: mod_base = OTHER; note = uracil
  modified_base 272: mod_base = OTHER; note = uracil
  modified_base 274: mod_base = OTHER; note = uracil
  modified_base 279: mod_base = OTHER; note = uracil
  modified_base 287: mod_base = OTHER; note = uracil
  modified_base 8: mod_base = m5c
  modified_base 11: mod_base = m5c
  modified_base 15: mod_base = m5c
  modified_base 19: mod_base = m5c
  modified_base 29: mod_base = m5c
  modified_base 31: mod_base = m5c
  modified_base 37: mod_base = m5c
  modified_base 43: mod_base = m5c
  modified_base 48: mod_base = m5c
  modified_base 60: mod_base = m5c
  modified_base 67: mod_base = m5c
  modified_base 70: mod_base = m5c
  modified_base 75: mod_base = m5c
  modified_base 80: mod_base = m5c
  modified_base 87: mod_base = m5c
  modified_base 101: mod_base = m5c
  modified_base 114: mod_base = m5c
  modified_base 121: mod_base = m5c
  modified_base 145: mod_base = m5c
  modified_base 151: mod_base = m5c
  modified_base 164: mod_base = m5c
  modified_base 169: mod_base = m5c
  modified_base 171: mod_base = m5c
  modified_base 197: mod_base = m5c
  modified_base 218: mod_base = m5c
  modified_base 221: mod_base = m5c
  modified_base 230: mod_base = m5c
  modified_base 268: mod_base = m5c
  variation 149: note = CpG site, residue is C if methylated or T(=U) if unmethylated
tgtagttcggcgggcgggcggagaagagcgcgggggcgatagcggggcgggtatgggagcggggttcgtcgaggcggggcgggattcgagattatagtttcggattttataagcggatgtcggggttttttttggttgttttagcgttygcggatttgtttgtcgaggcgcgtttttatttttagagtttatttttcgttttttttttagttttgttcgtcggaggattcggttgttatggtgaaggaaaaaggtaattataaatatcgattattgtgtatggttgtagaagttggaatg

SEQ ID NO: 83 - DNA, 300 bp, synthetic construct
  source 1..300: mol_type = other DNA
  modified_base 8..9: mod_base = OTHER; note = uracil
  modified_base 22..23: mod_base = OTHER; note = uracil
  modified_base 39: mod_base = OTHER; note = uracil
  modified_base 49: mod_base = OTHER; note = uracil
  modified_base 52: mod_base = OTHER; note = uracil
  modified_base 61: mod_base = OTHER; note = uracil
  modified_base 68: mod_base = OTHER; note = uracil
  modified_base 71: mod_base = OTHER; note = uracil
  modified_base 86..87: mod_base = OTHER; note = uracil
  modified_base 95: mod_base = OTHER; note = uracil
  modified_base 97: mod_base = OTHER; note = uracil
  modified_base 103: mod_base = OTHER; note = uracil
  modified_base 106..107: mod_base = OTHER; note = uracil
  modified_base 114..115: mod_base = OTHER; note = uracil
  modified_base 126: mod_base = OTHER; note = uracil
  modified_base 128: mod_base = OTHER; note = uracil
  modified_base 136..137: mod_base = OTHER; note = uracil
  modified_base 139: mod_base = OTHER; note = uracil
  modified_base 144..145: mod_base = OTHER; note = uracil
  modified_base 149: mod_base = OTHER; note = uracil
  modified_base 155: mod_base = OTHER; note = uracil
  modified_base 157: mod_base = OTHER; note = uracil
  modified_base 161: mod_base = OTHER; note = uracil
  modified_base 164..165: mod_base = OTHER; note = uracil
  modified_base 169: mod_base = OTHER; note = uracil
  modified_base 172: mod_base = OTHER; note = uracil
  modified_base 176: mod_base = OTHER; note = uracil
  modified_base 192: mod_base = OTHER; note = uracil
  modified_base 196: mod_base = OTHER; note = uracil
  modified_base 200: mod_base = OTHER; note = uracil
  modified_base 204: mod_base = OTHER; note = uracil
  modified_base 210..211: mod_base = OTHER; note = uracil
  modified_base 216: mod_base = OTHER; note = uracil
  modified_base 230..233: mod_base = OTHER; note = uracil
  modified_base 239..240: mod_base = OTHER; note = uracil
  modified_base 244..245: mod_base = OTHER; note = uracil
  modified_base 250..251: mod_base = OTHER; note = uracil
  modified_base 254: mod_base = OTHER; note = uracil
  modified_base 256: mod_base = OTHER; note = uracil
  modified_base 261..262: mod_base = OTHER; note = uracil
  modified_base 266: mod_base = OTHER; note = uracil
  modified_base 268..269: mod_base = OTHER; note = uracil
  modified_base 272..274: mod_base = OTHER; note = uracil
  modified_base 280: mod_base = OTHER; note = uracil
  modified_base 282: mod_base = OTHER; note = uracil
  modified_base 285: mod_base = OTHER; note = uracil
  modified_base 289: mod_base = OTHER; note = uracil
  modified_base 292..293: mod_base = OTHER; note = uracil
  modified_base 53: mod_base = m5c
  modified_base 173: mod_base = m5c
  modified_base 222: mod_base = m5c
  modified_base 252: mod_base = m5c
  variation 151: note = CpG site, residue is C if methylated or T(=U) if unmethylated
tatgatgttagtggttgaatattttagtagagaaaaattttgaataattaatcggaggtttaggagatagttgggtatttgagagtttatgagttatataagtaattttggagttaagttgtattttttgtttggttttagagttagtttygagtatatgtagttagattgtcggtagagaagatgtggagttggtattttggtttaggtttgagtaaggtcgtggaagttttaggtttttgattatggttcgtatagagttatgttttagttttgggttttagtaggtagttaggtgag

SEQ ID NO: 84 - DNA, 300 bp, synthetic construct
  source 1..300: mol_type = other DNA
  modified_base 1: mod_base = OTHER; note = uracil
  modified_base 3: mod_base = OTHER; note = uracil
  modified_base 5..6: mod_base = OTHER; note = uracil
  modified_base 10: mod_base = OTHER; note = uracil
  modified_base 13..14: mod_base = OTHER; note = uracil
  modified_base 17: mod_base = OTHER; note = uracil
  modified_base 23..25: mod_base = OTHER; note = uracil
  modified_base 30: mod_base = OTHER; note = uracil
  modified_base 36: mod_base = OTHER; note = uracil
  modified_base 41: mod_base = OTHER; note = uracil
  modified_base 43: mod_base = OTHER; note = uracil
  modified_base 52..53: mod_base = OTHER; note = uracil
  modified_base 59: mod_base = OTHER; note = uracil
  modified_base 65..66: mod_base = OTHER; note = uracil
  modified_base 72: mod_base = OTHER; note = uracil
  modified_base 75..76: mod_base = OTHER; note = uracil
  modified_base 81..82: mod_base = OTHER; note = uracil
  modified_base 86: mod_base = OTHER; note = uracil
  modified_base 88: mod_base = OTHER; note = uracil
  modified_base 92..93: mod_base = OTHER; note = uracil
  modified_base 98..99: mod_base = OTHER; note = uracil
  modified_base 106..107: mod_base = OTHER; note = uracil
  modified_base 110: mod_base = OTHER; note = uracil
  modified_base 112..113: mod_base = OTHER; note = uracil
  modified_base 115: mod_base = OTHER; note = uracil
  modified_base 118: mod_base = OTHER; note = uracil
  modified_base 121: mod_base = OTHER; note = uracil
  modified_base 123: mod_base = OTHER; note = uracil
  modified_base 126: mod_base = OTHER; note = uracil
  modified_base 130: mod_base = OTHER; note = uracil
  modified_base 134: mod_base = OTHER; note = uracil
  modified_base 138: mod_base = OTHER; note = uracil
  modified_base 141: mod_base = OTHER; note = uracil
  modified_base 147: mod_base = OTHER; note = uracil
  modified_base 154: mod_base = OTHER; note = uracil
  modified_base 158: mod_base = OTHER; note = uracil
  modified_base 160: mod_base = OTHER; note = uracil
  modified_base 166..167: mod_base = OTHER; note = uracil
  modified_base 171: mod_base = OTHER; note = uracil
  modified_base 180: mod_base = OTHER; note = uracil
  modified_base 183: mod_base = OTHER; note = uracil
  modified_base 188: mod_base = OTHER; note = uracil
  modified_base 190..191: mod_base = OTHER; note = uracil
  modified_base 199: mod_base = OTHER; note = uracil
  modified_base 208: mod_base = OTHER; note = uracil
  modified_base 210: mod_base = OTHER; note = uracil
  modified_base 216: mod_base = OTHER; note = uracil
  modified_base 218: mod_base = OTHER; note = uracil
  modified_base 220: mod_base = OTHER; note = uracil
  modified_base 226..228: mod_base = OTHER; note = uracil
  modified_base 231: mod_base = OTHER; note = uracil
  modified_base 235: mod_base = OTHER; note = uracil
  modified_base 237..238: mod_base = OTHER; note = uracil
  modified_base 243..244: mod_base = OTHER; note = uracil
  modified_base 246: mod_base = OTHER; note = uracil
  modified_base 259: mod_base = OTHER; note = uracil
  modified_base 269: mod_base = OTHER; note = uracil
  modified_base 271: mod_base = OTHER; note = uracil
  modified_base 274: mod_base = OTHER; note = uracil
  modified_base 284: mod_base = OTHER; note = uracil
  modified_base 287..288: mod_base = OTHER; note = uracil
  modified_base 290: mod_base = OTHER; note = uracil
  modified_base 294: mod_base = OTHER; note = uracil
  modified_base 297: mod_base = OTHER; note = uracil
  modified_base 48: mod_base = m5c
  modified_base 78: mod_base = m5c
  modified_base 127: mod_base = m5c
  modified_base 247: mod_base = m5c
  variation 149: note = CpG site, residue is C if methylated or T(=U) if unmethylated
tttatttggttgtttgttgagatttagggttggagtatggttttgtgcgggttatggttaggaatttggggtttttacgattttgtttaggtttaagttagaatgttagttttatattttttttgtcggtagtttggttgtatgtgttygagattggttttgaggttaaatagagaatataatttggttttaaggttgtttatgtgatttataggtttttaaatatttagttgttttttgaattttcggttgattatttaagatttttttttattaaggtatttaattattggtattata

SEQ ID NO: 85 - DNA, 300 bp, synthetic construct
  source 1..300: mol_type = other DNA
  modified_base 5: mod_base = OTHER; note = uracil
  modified_base 9: mod_base = OTHER; note = uracil
  modified_base 15..16: mod_base = OTHER; note = uracil
  modified_base 21: mod_base = OTHER; note = uracil
  modified_base 24: mod_base = OTHER; note = uracil
  modified_base 26: mod_base = OTHER; note = uracil
  modified_base 31: mod_base = OTHER; note = uracil
  modified_base 36: mod_base = OTHER; note = uracil
  modified_base 43..45: mod_base = OTHER; note = uracil
  modified_base 55: mod_base = OTHER; note = uracil
  modified_base 57: mod_base = OTHER; note = uracil
  modified_base 62: mod_base = OTHER; note = uracil
  modified_base 65..66: mod_base = OTHER; note = uracil
  modified_base 68..69: mod_base = OTHER; note = uracil
  modified_base 72: mod_base = OTHER; note = uracil
  modified_base 78..80: mod_base = OTHER; note = uracil
  modified_base 83: mod_base = OTHER; note = uracil
  modified_base 85: mod_base = OTHER; note = uracil
  modified_base 87..88: mod_base = OTHER; note = uracil
  modified_base 94: mod_base = OTHER; note = uracil
  modified_base 98: mod_base = OTHER; note = uracil
  modified_base 101..102: mod_base = OTHER; note = uracil
  modified_base 107..108: mod_base = OTHER; note = uracil
  modified_base 114: mod_base = OTHER; note = uracil
  modified_base 116..119: mod_base = OTHER; note = uracil
  modified_base 122: mod_base = OTHER; note = uracil
  modified_base 125: mod_base = OTHER; note = uracil
  modified_base 129: mod_base = OTHER; note = uracil
  modified_base 139..140: mod_base = OTHER; note = uracil
  modified_base 144: mod_base = OTHER; note = uracil
  modified_base 158: mod_base = OTHER; note = uracil
  modified_base 161: mod_base = OTHER; note = uracil
  modified_base 163..164: mod_base = OTHER; note = uracil
  modified_base 174: mod_base = OTHER; note = uracil
  modified_base 181..182: mod_base = OTHER; note = uracil
  modified_base 187: mod_base = OTHER; note = uracil
  modified_base 192: mod_base = OTHER; note = uracil
  modified_base 201: mod_base = OTHER; note = uracil
  modified_base 204: mod_base = OTHER; note = uracil
  modified_base 207: mod_base = OTHER; note = uracil
  modified_base 213: mod_base = OTHER; note = uracil
  modified_base 224: mod_base = OTHER; note = uracil
  modified_base 227: mod_base = OTHER; note = uracil
  modified_base 229: mod_base = OTHER; note = uracil
  modified_base 234: mod_base = OTHER; note = uracil
  modified_base 244: mod_base = OTHER; note = uracil
  modified_base 247..249: mod_base = OTHER; note = uracil
  modified_base 253: mod_base = OTHER; note = uracil
  modified_base 255..256: mod_base = OTHER; note = uracil
  modified_base 259: mod_base = OTHER; note = uracil
  modified_base 262..263: mod_base = OTHER; note = uracil
  modified_base 266..267: mod_base = OTHER; note = uracil
  modified_base 272..273: mod_base = OTHER; note = uracil
  modified_base 282: mod_base = OTHER; note = uracil
  modified_base 287..288: mod_base = OTHER; note = uracil
  modified_base 294..295: mod_base = OTHER; note = uracil
  modified_base 299..300: mod_base = OTHER; note = uracil
  modified_base 7: mod_base = m5c
  modified_base 48: mod_base = m5c
  modified_base 58: mod_base = m5c
  modified_base 60: mod_base = m5c
  modified_base 90: mod_base = m5c
  modified_base 103: mod_base = m5c
  modified_base 123: mod_base = m5c
  modified_base 141: mod_base = m5c
  modified_base 172: mod_base = m5c
  modified_base 183: mod_base = m5c
  modified_base 245: mod_base = m5c
  modified_base 250: mod_base = m5c
  modified_base 291: mod_base = m5c
  variation 135: note = CpG site, residue is C if methylated or T(=U) if unmethylated
  variation 167: note = CpG site, residue is C if methylated or T(=U) if unmethylated
ggggttcgtagtggtttagtttgttttgggttttgttggatgtttttcgagaattatcgcgtaattttttttagaggtttaatattttacgtgttgatttttcgggtttgtgttttttttgtcgtagattgaagygttttcggttgaaggtgaggttttgtattaaygagtcgtagaagtttcgggtagagttggtggggtagttttagaggttgggatttgatatttttgagtaggaggtgatcgtttcggtattagttgtttgttagattttgaaggagtaaggtttgcgattatatt

SEQ ID NO: 86 - DNA, 300 bp, synthetic construct
  source 1..300: mol_type = other DNA
  modified_base 11: mod_base = OTHER; note = uracil
  modified_base 15..16: mod_base = OTHER; note = uracil
  modified_base 20: mod_base = OTHER; note = uracil
  modified_base 22..23: mod_base = OTHER; note = uracil
  modified_base 26: mod_base = OTHER; note = uracil
  modified_base 32: mod_base = OTHER; note = uracil
  modified_base 36: mod_base = OTHER; note = uracil
  modified_base 40: mod_base = OTHER; note = uracil
  modified_base 43: mod_base = OTHER; note = uracil
  modified_base 49: mod_base = OTHER; note = uracil
  modified_base 59: mod_base = OTHER; note = uracil
  modified_base 61..62: mod_base = OTHER; note = uracil
  modified_base 64..65: mod_base = OTHER; note = uracil
  modified_base 68: mod_base = OTHER; note = uracil
  modified_base 70: mod_base = OTHER; note = uracil
  modified_base 79: mod_base = OTHER; note = uracil
  modified_base 84..86: mod_base = OTHER; note = uracil
  modified_base 89..90: mod_base = OTHER; note = uracil
  modified_base 92: mod_base = OTHER; note = uracil
  modified_base 98: mod_base = OTHER; note = uracil
  modified_base 101..104: mod_base = OTHER; note = uracil
  modified_base 106..107: mod_base = OTHER; note = uracil
  modified_base 110: mod_base = OTHER; note = uracil
  modified_base 112: mod_base = OTHER; note = uracil
  modified_base 115..116: mod_base = OTHER; note = uracil
  modified_base 122: mod_base = OTHER; note = uracil
  modified_base 125: mod_base = OTHER; note = uracil
  modified_base 131: mod_base = OTHER; note = uracil
  modified_base 141: mod_base = OTHER; note = uracil
  modified_base 146..147: mod_base = OTHER; note = uracil
  modified_base 149: mod_base = OTHER; note = uracil
  modified_base 151..152: mod_base = OTHER; note = uracil
  modified_base 155: mod_base = OTHER; note = uracil
  modified_base 158: mod_base = OTHER; note = uracil
  modified_base 167: mod_base = OTHER; note = uracil
  modified_base 170: mod_base = OTHER; note = uracil
  modified_base 174: mod_base = OTHER; note = uracil
  modified_base 180: mod_base = OTHER; note = uracil
  modified_base 189: mod_base = OTHER; note = uracil
  modified_base 191: mod_base = OTHER; note = uracil
  modified_base 195..196: mod_base = OTHER; note = uracil
  modified_base 205: mod_base = OTHER; note = uracil
  modified_base 208: mod_base = OTHER; note = uracil
  modified_base 224..225: mod_base = OTHER; note = uracil
  modified_base 227: mod_base = OTHER; note = uracil
  modified_base 250: mod_base = OTHER; note = uracil
  modified_base 259: mod_base = OTHER; note = uracil
  modified_base 262..263: mod_base = OTHER; note = uracil
  modified_base 266: mod_base = OTHER; note = uracil
  modified_base 271..273: mod_base = OTHER; note = uracil
  modified_base 278: mod_base = OTHER; note = uracil
  modified_base 282: mod_base = OTHER; note = uracil
  modified_base 287..288: mod_base = OTHER; note = uracil
  modified_base 290: mod_base = OTHER; note = uracil
  modified_base 297..300: mod_base = OTHER; note = uracil
  modified_base 9: mod_base = m5c
  modified_base 50: mod_base = m5c
  modified_base 55: mod_base = m5c
  modified_base 117: mod_base = m5c
  modified_base 128: mod_base = m5c
  modified_base 159: mod_base = m5c
  modified_base 177: mod_base = m5c
  modified_base 197: mod_base = m5c
  modified_base 210: mod_base = m5c
  modified_base 240: mod_base = m5c
  modified_base 242: mod_base = m5c
  modified_base 252: mod_base = m5c
  modified_base 293: mod_base = m5c
  variation 133: note = CpG site, residue is C if methylated or T(=U) if unmethylated
  variation 165: note = CpG site, residue is C if methylated or T(=U) if unmethylated
ggtatggtcgtaggttttgtttttttaggatttggtaggtagttggtgtcggggcggttattttttgtttagagatgttaaattttagtttttgaagttgttttattagttttgttcgggatttttgcgattygttggtgtagaattttatttttagtcgggaaygttttagtttgcggtaggggagatataggttcgggaagttagtacgtggagtgttgggtttttgaaggaggttgcgcggtgattttcgaagggtatttagtaaagtttagagtagattaggttattgcgagtttt

SEQ ID NO: 87 - DNA, 300 bp, synthetic construct
  source 1..300: mol_type = other DNA
  modified_base 7..8: mod_base = OTHER; note = uracil
  modified_base 11: mod_base = OTHER; note = uracil
  modified_base 18..19: mod_base = OTHER; note = uracil
  modified_base 35: mod_base = OTHER; note = uracil
  modified_base 41: mod_base = OTHER; note = uracil
  modified_base 43: mod_base = OTHER; note = uracil
  modified_base 51: mod_base = OTHER; note = uracil
  modified_base 56: mod_base = OTHER; note = uracil
  modified_base 58..59: mod_base = OTHER; note = uracil
  modified_base 62: mod_base = OTHER; note = uracil
  modified_base 65: mod_base = OTHER; note = uracil
  modified_base 68: mod_base = OTHER; note = uracil
  modified_base 71: mod_base = OTHER; note = uracil
  modified_base 73..74: mod_base = OTHER; note = uracil
  modified_base 78: mod_base = OTHER; note = uracil
  modified_base 81: mod_base = OTHER; note = uracil
  modified_base 83: mod_base = OTHER; note = uracil
  modified_base 91: mod_base = OTHER; note = uracil
  modified_base 96: mod_base = OTHER; note = uracil
  modified_base 98: mod_base = OTHER; note = uracil
  modified_base 100..101: mod_base = OTHER; note = uracil
  modified_base 128: mod_base = OTHER; note = uracil
  modified_base 131: mod_base = OTHER; note = uracil
  modified_base 133..134: mod_base = OTHER; note = uracil
  modified_base 138: mod_base = OTHER; note = uracil
  modified_base 141: mod_base = OTHER; note = uracil
  modified_base 143: mod_base = OTHER; note = uracil
  modified_base 145: mod_base = OTHER; note = uracil
  modified_base 148..149: mod_base = OTHER; note = uracil
  modified_base 155: mod_base = OTHER; note = uracil
  modified_base 158: mod_base = OTHER; note = uracil
  modified_base 162..163: mod_base = OTHER; note = uracil
  modified_base 171: mod_base = OTHER; note = uracil
  modified_base 189: mod_base = OTHER; note = uracil
  modified_base 205: mod_base = OTHER; note = uracil
  modified_base 210..211: mod_base = OTHER; note = uracil
  modified_base 213..214: mod_base = OTHER; note = uracil
  modified_base 217: mod_base = OTHER; note = uracil
  modified_base 219: mod_base = OTHER; note = uracil
  modified_base 222: mod_base = OTHER; note = uracil
  modified_base 229..231: mod_base = OTHER; note = uracil
  modified_base 234..235: mod_base = OTHER; note = uracil
  modified_base 242..243: mod_base = OTHER; note = uracil
  modified_base 246: mod_base = OTHER; note = uracil
  modified_base 248..249: mod_base = OTHER; note = uracil
  modified_base 253: mod_base = OTHER; note = uracil
  modified_base 259: mod_base = OTHER; note = uracil
  modified_base 266: mod_base = OTHER; note = uracil
  modified_base 273: mod_base = OTHER; note = uracil
  modified_base 275: mod_base = OTHER; note = uracil
  modified_base 279..282: mod_base = OTHER; note = uracil
  modified_base 286..287: mod_base = OTHER; note = uracil
  modified_base 289: mod_base = OTHER; note = uracil
  modified_base 292: mod_base = OTHER; note = uracil
  modified_base 300: mod_base = OTHER; note = uracil
  modified_base 2: mod_base = m5c
  modified_base 14: mod_base = m5c
  modified_base 20: mod_base = m5c
  modified_base 23: mod_base = m5c
  modified_base 30: mod_base = m5c
  modified_base 39: mod_base = m5c
  modified_base 44: mod_base = m5c
  modified_base 52: mod_base = m5c
  modified_base 54: mod_base = m5c
  modified_base 79: mod_base = m5c
  modified_base 88: mod_base = m5c
  modified_base 92: mod_base = m5c
  modified_base 104: mod_base = m5c
  modified_base 107: mod_base = m5c
  modified_base 120: mod_base = m5c
  modified_base 124: mod_base = m5c
  modified_base 135: mod_base = m5c
  modified_base 167: mod_base = m5c
  modified_base 187: mod_base = m5c
  modified_base 202: mod_base = m5c
  modified_base 206: mod_base = m5c
  modified_base 215: mod_base = m5c
  modified_base 225: mod_base = m5c
  modified_base 227: mod_base = m5c
  modified_base 232: mod_base = m5c
  modified_base 236: mod_base = m5c
  modified_base 254: mod_base = m5c
  modified_base 257: mod_base = m5c
  modified_base 260: mod_base = m5c
  modified_base 277: mod_base = m5c
  variation 151: note = CpG site, residue is C if methylated or T(=U) if unmethylated
gcggggttagtagcgtgttcggcgggaagcggtataggcgtttcgggaagtcgcgtattagttgttttagtattatgtcgtttaggtcggtcgtgtttttttgcgacgggttgaagatgcggacgaatttttttcggtagtttatagttaygatttttaggtttgtcgggttgggaagagaggagacgttgtgaggagatgcggtcggtttattcgtatagttgcgcgtttcgttcggaaattagttttagttcggcgtcggaggtttgggttattcgttttttatttttgtaggagttt

SEQ ID NO: 88 - DNA, 300 bp, synthetic construct
  source 1..300: mol_type = other DNA
  modified_base 4: mod_base = OTHER; note = uracil
  modified_base 6..7: mod_base = OTHER; note = uracil
  modified_base 10: mod_base = OTHER; note = uracil
  modified_base 30..32: mod_base = OTHER; note = uracil
  modified_base 36..37: mod_base = OTHER; note = uracil
  modified_base 39: mod_base = OTHER; note = uracil
  modified_base 45: mod_base = OTHER; note = uracil
  modified_base 50: mod_base = OTHER; note = uracil
  modified_base 56: mod_base = OTHER; note = uracil
  modified_base 63: mod_base = OTHER; note = uracil
  modified_base 77: mod_base = OTHER; note = uracil
  modified_base 80: mod_base = OTHER; note = uracil
  modified_base 93: mod_base = OTHER; note = uracil
  modified_base 97: mod_base = OTHER; note = uracil
  modified_base 100: mod_base = OTHER; note = uracil
  modified_base 103: mod_base = OTHER; note = uracil
  modified_base 105..106: mod_base = OTHER; note = uracil
  modified_base 108: mod_base = OTHER; note = uracil
  modified_base 110: mod_base = OTHER; note = uracil
  modified_base 116: mod_base = OTHER; note = uracil
  modified_base 118..119: mod_base = OTHER; note = uracil
  modified_base 121: mod_base = OTHER; note = uracil
  modified_base 123: mod_base = OTHER; note = uracil
  modified_base 126..128: mod_base = OTHER; note = uracil
  modified_base 131..132: mod_base = OTHER; note = uracil
  modified_base 136: mod_base = OTHER; note = uracil
  modified_base 140..141: mod_base = OTHER; note = uracil
  modified_base 154: mod_base = OTHER; note = uracil
  modified_base 161: mod_base = OTHER; note = uracil
  modified_base 164: mod_base = OTHER; note = uracil
  modified_base 179: mod_base = OTHER; note = uracil
  modified_base 182: mod_base = OTHER; note = uracil
  modified_base 185: mod_base = OTHER; note = uracil
  modified_base 188: mod_base = OTHER; note = uracil
  modified_base 191..192: mod_base = OTHER; note = uracil
  modified_base 198: mod_base = OTHER; note = uracil
  modified_base 206: mod_base = OTHER; note = uracil
  modified_base 211: mod_base = OTHER; note = uracil
  modified_base 215..216: mod_base = OTHER; note = uracil
  modified_base 224: mod_base = OTHER; note = uracil
  modified_base 231: mod_base = OTHER; note = uracil
  modified_base 237: mod_base = OTHER; note = uracil
  modified_base 240: mod_base = OTHER; note = uracil
  modified_base 251: mod_base = OTHER; note = uracil
  modified_base 254..255: mod_base = OTHER; note = uracil
  modified_base 263..264: mod_base = OTHER; note = uracil
  modified_base 269: mod_base = OTHER; note = uracil
  modified_base 272: mod_base = OTHER; note = uracil
  modified_base 275..276: mod_base = OTHER; note = uracil
  modified_base 279: mod_base = OTHER; note = uracil
  modified_base 284: mod_base = OTHER; note = uracil
  modified_base 288: mod_base = OTHER; note = uracil
  modified_base 291: mod_base = OTHER; note = uracil
  modified_base 295..297: mod_base = OTHER; note = uracil
  modified_base 300: mod_base = OTHER; note = uracil
  modified_base 23: mod_base = m5c
  modified_base 40: mod_base = m5c
  modified_base 43: mod_base = m5c
  modified_base 46: mod_base = m5c
  modified_base 64: mod_base = m5c
  modified_base 68: mod_base = m5c
  modified_base 73: mod_base = m5c
  modified_base 75: mod_base = m5c
  modified_base 85: mod_base = m5c
  modified_base 94: mod_base = m5c
  modified_base 98: mod_base = m5c
  modified_base 113: mod_base = m5c
  modified_base 133: mod_base = m5c
  modified_base 165: mod_base = m5c
  modified_base 176: mod_base = m5c
  modified_base 180: mod_base = m5c
  modified_base 193: mod_base = m5c
  modified_base 196: mod_base = m5c
  modified_base 208: mod_base = m5c
  modified_base 212: mod_base = m5c
  modified_base 221: mod_base = m5c
  modified_base 246: mod_base = m5c
  modified_base 248: mod_base = m5c
  modified_base 256: mod_base = m5c
  modified_base 261: mod_base = m5c
  modified_base 270: mod_base = m5c
  modified_base 277: mod_base = m5c
  modified_base 280: mod_base = m5c
  modified_base 286: mod_base = m5c
  modified_base 298: mod_base = m5c
  variation 149: note = CpG site, residue is C if methylated or T(=U) if unmethylated
gaatttttgtagaggtaaggggcgagtgatttaagttttcggcgtcggattggagttggttttcgggcggggcgcgtagttgtgcgggtggatcggtcgtatttttttatagcgttttttttttttttagttcgataggtttgaagatygtggttgtgagttgtcgggagaagttcgttcgtatttttaattcgtcgtaggagagtacggtcgatttgagcggtatggtgttgaagtagttggtgcgcggtttttcggagcgtttgtatcgtttttcgtcgggtacgttgttggtttcgt

SEQ ID NO: 89 - DNA, 300 bp, synthetic construct
  source 1..300: mol_type = other DNA
  modified_base 17: mod_base = OTHER; note = uracil
  modified_base 20..21: mod_base = OTHER; note = uracil
  modified_base 23: mod_base = OTHER; note = uracil
  modified_base 28: mod_base = OTHER; note = uracil
  modified_base 31: mod_base = OTHER; note = uracil
  modified_base 39: mod_base = OTHER; note = uracil
  modified_base 41: mod_base = OTHER; note = uracil
  modified_base 49..50: mod_base = OTHER; note = uracil
  modified_base 53..54: mod_base = OTHER; note = uracil
  modified_base 61: mod_base = OTHER; note = uracil
  modified_base 66..68: mod_base = OTHER; note = uracil
  modified_base 72: mod_base = OTHER; note = uracil
  modified_base 75: mod_base = OTHER; note = uracil
  modified_base 78..79: mod_base = OTHER; note = uracil
  modified_base 82..84: mod_base = OTHER; note = uracil
  modified_base 87: mod_base = OTHER; note = uracil
  modified_base 89: mod_base = OTHER; note = uracil
  modified_base 91..92: mod_base = OTHER; note = uracil
  modified_base 97..98: mod_base = OTHER; note = uracil
  modified_base 105: mod_base = OTHER; note = uracil
  modified_base 111..112: mod_base = OTHER; note = uracil
  modified_base 119: mod_base = OTHER; note = uracil
  modified_base 139: mod_base = OTHER; note = uracil
  modified_base 142..145: mod_base = OTHER; note = uracil
  modified_base 148..150: mod_base = OTHER; note = uracil
  modified_base 153: mod_base = OTHER; note = uracil
  modified_base 155: mod_base = OTHER; note = uracil
  modified_base 158: mod_base = OTHER; note = uracil
  modified_base 164: mod_base = OTHER; note = uracil
  modified_base 168..169: mod_base = OTHER; note = uracil
  modified_base 183: mod_base = OTHER; note = uracil
  modified_base 189: mod_base = OTHER; note = uracil
  modified_base 194: mod_base = OTHER; note = uracil
  modified_base 207: mod_base = OTHER; note = uracil
  modified_base 210..211: mod_base = OTHER; note = uracil
  modified_base 216..219: mod_base = OTHER; note = uracil
  modified_base 221: mod_base = OTHER; note = uracil
  modified_base 223..224: mod_base = OTHER; note = uracil
  modified_base 229: mod_base = OTHER; note = uracil
  modified_base 236..237: mod_base = OTHER; note = uracil
  modified_base 239: mod_base = OTHER; note = uracil
  modified_base 241..242: mod_base = OTHER; note = uracil
  modified_base 246..248: mod_base = OTHER; note = uracil
  modified_base 254: mod_base = OTHER; note = uracil
  modified_base 256: mod_base = OTHER; note = uracil
  modified_base 263: mod_base = OTHER; note = uracil
  modified_base 267: mod_base = OTHER; note = uracil
  modified_base 280..281: mod_base = OTHER; note = uracil
  modified_base 285: mod_base = OTHER; note = uracil
  modified_base 292: mod_base = OTHER; note = uracil
  modified_base 297..298: mod_base = OTHER; note = uracil
  modified_base 93: mod_base = m5c
  modified_base 120: mod_base = m5c
  modified_base 190: mod_base = m5c
  variation 151: note = CpG site, residue is C if methylated or T(=U) if unmethylated
aggagtgtttggggtgtttttttttggttgtagtgggatataggtgtgtttttttaggaattgggttttgattatttttagtttaatattttcgggtttgtgaattgtgatttgtgtgtcgggatgggttttgtgggtttgttttattttygtattgttggatttggttaagtgggtgaaggttaaggtcggttagagttgagtttttgttttgtttttttttttgggttagatgttatattaggtttagtgatttatagggtaggtagttgggaaatattaggtagagggtaggttttg

SEQ ID NO: 90 - DNA, 300 bp, synthetic construct
  source 1..300: mol_type = other DNA
  modified_base 1: mod_base = OTHER; note = uracil
  modified_base 6..7: mod_base = OTHER; note = uracil
  modified_base 10..12: mod_base = OTHER; note = uracil
  modified_base 14: mod_base = OTHER; note = uracil
  modified_base 17..18: mod_base = OTHER; note = uracil
  modified_base 27..29: mod_base = OTHER; note = uracil
  modified_base 32: mod_base = OTHER; note = uracil
  modified_base 35..36: mod_base = OTHER; note = uracil
  modified_base 39..41: mod_base = OTHER; note = uracil
  modified_base 49: mod_base = OTHER; note = uracil
  modified_base 51: mod_base = OTHER; note = uracil
  modified_base 56..57: mod_base = OTHER; note = uracil
  modified_base 66: mod_base = OTHER; note = uracil
  modified_base 69: mod_base = OTHER; note = uracil
  modified_base 73..75: mod_base = OTHER; note = uracil
  modified_base 87: mod_base = OTHER; note = uracil
  modified_base 92: mod_base = OTHER; note = uracil
  modified_base 98: mod_base = OTHER; note = uracil
  modified_base 100: mod_base = OTHER; note = uracil
  modified_base 103: mod_base = OTHER; note = uracil
  modified_base 105: mod_base = OTHER; note = uracil
  modified_base 109: mod_base = OTHER; note = uracil
  modified_base 113..114: mod_base = OTHER; note = uracil
  modified_base 119..120: mod_base = OTHER; note = uracil
  modified_base 123: mod_base = OTHER; note = uracil
  modified_base 125..127: mod_base = OTHER; note = uracil
  modified_base 129: mod_base = OTHER; note = uracil
  modified_base 134..135: mod_base = OTHER; note = uracil
  modified_base 140..141: mod_base = OTHER; note = uracil
  modified_base 144: mod_base = OTHER; note = uracil
  modified_base 160: mod_base = OTHER; note = uracil
  modified_base 164..166: mod_base = OTHER; note = uracil
  modified_base 168: mod_base = OTHER; note = uracil
  modified_base 173..175: mod_base = OTHER; note = uracil
  modified_base 178..179: mod_base = OTHER; note = uracil
  modified_base 183: mod_base = OTHER; note = uracil
  modified_base 185: mod_base = OTHER; note = uracil
  modified_base 187: mod_base = OTHER; note = uracil
  modified_base 192: mod_base = OTHER; note = uracil
  modified_base 194: mod_base = OTHER; note = uracil
  modified_base 199: mod_base = OTHER; note = uracil
  modified_base 201: mod_base = OTHER; note = uracil
  modified_base 205..206: mod_base = OTHER; note = uracil
  modified_base 220: mod_base = OTHER; note = uracil
  modified_base 231: mod_base = OTHER; note = uracil
  modified_base 236..238: mod_base = OTHER; note = uracil
  modified_base 243..244: mod_base = OTHER; note = uracil
  modified_base 253: mod_base = OTHER; note = uracil
  modified_base 255: mod_base = OTHER; note = uracil
  modified_base 257..258: mod_base = OTHER; note = uracil
  modified_base 264..266: mod_base = OTHER; note = uracil
  modified_base 268: mod_base = OTHER; note = uracil
  modified_base 271: mod_base = OTHER; note = uracil
  modified_base 274..275: mod_base = OTHER; note = uracil
  modified_base 285: mod_base = OTHER; note = uracil
  modified_base 287..290: mod_base = OTHER; note = uracil
  modified_base 294: mod_base = OTHER; note = uracil
  modified_base 296: mod_base = OTHER; note = uracil
  modified_base 298..299: mod_base = OTHER; note = uracil
  modified_base 110: mod_base = m5c
  modified_base 180: mod_base = m5c
  modified_base 207: mod_base = m5c
  variation 149: note = CpG site, residue is C if methylated or T(=U) if unmethylated
taggatttgttttttgtttggtattttttaattgtttgttttatgagttattgggtttggtgtggtatttagtttaggagaggggataaggtagaaatttaattttgatcggttttagtttttatttatttggttagatttagtagtgyggggatggggtagatttataaaatttatttcggtatataggttatagtttataggttcgggagtgttgggttggaagtagttagggtttagtttttaggaaggtatatttgtgttttattgtagttaagaggaagtattttaaatattttt

SEQ ID NO: 91 - DNA, 300 bp, synthetic construct
  source 1..300: mol_type = other DNA
  modified_base 2: mod_base = OTHER; note = uracil
  modified_base 9: mod_base = OTHER; note = uracil
  modified_base 13..14: mod_base = OTHER; note = uracil
  modified_base 32: mod_base = OTHER; note = uracil
  modified_base 34: mod_base = OTHER; note = uracil
  modified_base 44: mod_base = OTHER; note = uracil
  modified_base 62: mod_base = OTHER; note = uracil
  modified_base 80: mod_base = OTHER; note = uracil
  modified_base 83: mod_base = OTHER; note = uracil
  modified_base 89: mod_base = OTHER; note = uracil
  modified_base 91..92: mod_base = OTHER; note = uracil
  modified_base 94: mod_base = OTHER; note = uracil
  modified_base 96: mod_base = OTHER; note = uracil
  modified_base 98..99: mod_base = OTHER; note = uracil
  modified_base 105: mod_base = OTHER; note = uracil
  modified_base 107..108: mod_base = OTHER; note = uracil
  modified_base 113..116: mod_base = OTHER; note = uracil
  modified_base 118..121: mod_base = OTHER; note = uracil
  modified_base 131..133: mod_base = OTHER; note = uracil
  modified_base 137..139: mod_base = OTHER; note = uracil
  modified_base 149: mod_base = OTHER; note = uracil
  modified_base 157..158: mod_base = OTHER; note = uracil
  modified_base 165..167: mod_base = OTHER; note = uracil
  modified_base 174..177: mod_base = OTHER; note = uracil
  modified_base 183..184: mod_base = OTHER; note = uracil
  modified_base 186: mod_base = OTHER; note = uracil
  modified_base 194: mod_base = OTHER; note = uracil
  modified_base 196: mod_base = OTHER; note = uracil
  modified_base 198: mod_base = OTHER; note = uracil
  modified_base 206: mod_base = OTHER; note = uracil
  modified_base 214: mod_base = OTHER; note = uracil
  modified_base 221: mod_base = OTHER; note = uracil
  modified_base 248: mod_base = OTHER; note = uracil
  modified_base 250: mod_base = OTHER; note = uracil
  modified_base 257: mod_base = OTHER; note = uracil
  modified_base 263: mod_base = OTHER; note = uracil
  modified_base 266: mod_base = OTHER; note = uracil
  modified_base 269..272: mod_base = OTHER; note = uracil
  modified_base 277..278: mod_base = OTHER; note = uracil
  modified_base 287..288: mod_base = OTHER; note = uracil
  modified_base 292: mod_base = OTHER; note = uracil
  modified_base 296: mod_base = OTHER; note = uracil
  modified_base 300: mod_base = OTHER; note = uracil
  modified_base 17: mod_base = m5c
  modified_base 38: mod_base = m5c
  modified_base 140: mod_base = m5c
  modified_base 187: mod_base = m5c
  modified_base 209: mod_base = m5c
  modified_base 251: mod_base = m5c
  variation 151: note = CpG site, residue is C if methylated or T(=U) if unmethylated
  variation 162: note = CpG site, residue is C if methylated or T(=U) if unmethylated
gtaggaattaggttagcgtatgtaatgaaaatttttgcgttatttttttagaaggatgtgattgtattttatgagtatgtagtagggttattatatattttttgtttttgggttttttttttgtgtgtagtttaggtttcggtttgtgttygagggttagayggttttatggtttttagtttttttcgtagattatatagggaggtagcgaggtagggtgtaaggatgttaggggtggaaggggtgatatcgggagtaaagattgttattttttggtttggataaatttgtttgatattt

SEQ ID NO: 92 - DNA, 300 bp, synthetic construct
  source 1..300: mol_type = other DNA
  modified_base 7: mod_base = OTHER; note = uracil
  modified_base 11: mod_base = OTHER; note = uracil
  modified_base 20..21: mod_base = OTHER; note = uracil
  modified_base 25..26: mod_base = OTHER; note = uracil
  modified_base 36: mod_base = OTHER; note = uracil
  modified_base 40: mod_base = OTHER; note = uracil
  modified_base 45: mod_base = OTHER; note = uracil
  modified_base 47..48: mod_base = OTHER; note = uracil
  modified_base 55: mod_base = OTHER; note = uracil
  modified_base 57..60: mod_base = OTHER; note = uracil
  modified_base 63..64: mod_base = OTHER; note = uracil
  modified_base 66..69: mod_base = OTHER; note = uracil
  modified_base 73: mod_base = OTHER; note = uracil
  modified_base 76..77: mod_base = OTHER; note = uracil
  modified_base 81: mod_base = OTHER; note = uracil
  modified_base 83..85: mod_base = OTHER; note = uracil
  modified_base 88..89: mod_base = OTHER; note = uracil
  modified_base 93: mod_base = OTHER; note = uracil
  modified_base 96..97: mod_base = OTHER; note = uracil
  modified_base 99..101: mod_base = OTHER; note = uracil
  modified_base 110: mod_base = OTHER; note = uracil
  modified_base 122: mod_base = OTHER; note = uracil
  modified_base 129..130: mod_base = OTHER; note = uracil
  modified_base 137: mod_base = OTHER; note = uracil
  modified_base 141: mod_base = OTHER; note = uracil
  modified_base 145..147: mod_base = OTHER; note = uracil
  modified_base 153: mod_base = OTHER; note = uracil
  modified_base 155: mod_base = OTHER; note = uracil
  modified_base 159: mod_base = OTHER; note = uracil
  modified_base 165..166: mod_base = OTHER; note = uracil
  modified_base 171: mod_base = OTHER; note = uracil
  modified_base 174: mod_base = OTHER; note = uracil
  modified_base 176: mod_base = OTHER; note = uracil
  modified_base 178: mod_base = OTHER; note = uracil
  modified_base 189..191: mod_base = OTHER; note = uracil
  modified_base 197: mod_base = OTHER; note = uracil
  modified_base 214..216: mod_base = OTHER; note = uracil
  modified_base 219: mod_base = OTHER; note = uracil
  modified_base 222: mod_base = OTHER; note = uracil
  modified_base 226: mod_base = OTHER; note = uracil
  modified_base 228: mod_base = OTHER; note = uracil
  modified_base 237: mod_base = OTHER; note = uracil
  modified_base 241: mod_base = OTHER; note = uracil
  modified_base 243: mod_base = OTHER; note = uracil
  modified_base 246..247: mod_base = OTHER; note = uracil
  modified_base 250: mod_base = OTHER; note = uracil
  modified_base 264: mod_base = OTHER; note = uracil
  modified_base 274: mod_base = OTHER; note = uracil
  modified_base 279: mod_base = OTHER; note = uracil
  modified_base 285: mod_base = OTHER; note = uracil
  modified_base 289..290: mod_base = OTHER; note = uracil
  modified_base 296..297: mod_base = OTHER; note = uracil
  modified_base 300: mod_base = OTHER; note = uracil
  modified_base 49: mod_base = m5c
  modified_base 91: mod_base = m5c
  modified_base 113: mod_base = m5c
  modified_base 138: mod_base = m5c
  modified_base 262: mod_base = m5c
  modified_base 283: mod_base = m5c
  variation 149: note = CpG site, residue is C if methylated or T(=U) if unmethylated
  variation 160: note = CpG site, residue is C if methylated or T(=U) if unmethylated
gaatgttagataggtttatttaggttaaggggtagtagtttttgttttcggtgttattttttttatttttaatatttttgtattttgtttcgttgtttttttgtgtgatttacggaggaaattggggattatagggtcgtttggttttygagtataaatyggggtttgggttatatataggggaggggtttaggagtaaaaggtgtgtggtgattttgttgtatatttataaaatatagttatatttttttaaaaagataacgtaagagtttttattatatacgttggtttgatttttgt

SEQ ID NO: 93 - DNA, 301 bp, synthetic construct
  source 1..301: mol_type = other DNA
  modified_base 4: mod_base = OTHER; note = uracil
  modified_base 22: mod_base = OTHER; note = uracil
  modified_base 25: mod_base = OTHER; note = uracil
  modified_base 31: mod_base = OTHER; note = uracil
  modified_base 33..34: mod_base = OTHER; note = uracil
  modified_base 36: mod_base = OTHER; note = uracil
  modified_base 38: mod_base = OTHER; note = uracil
  modified_base 40..41: mod_base = OTHER; note = uracil
  modified_base 47: mod_base = OTHER; note = uracil
  modified_base 49..50: mod_base = OTHER; note = uracil
  modified_base 55..58: mod_base = OTHER; note = uracil
  modified_base 60..63: mod_base = OTHER; note = uracil
  modified_base 73..75: mod_base = OTHER; note = uracil
  modified_base 79..81: mod_base = OTHER; note = uracil
  modified_base 91: mod_base = OTHER; note = uracil
  modified_base 99..100: mod_base = OTHER; note = uracil
  modified_base 107..109: mod_base = OTHER; note = uracil
  modified_base 116..119: mod_base = OTHER; note = uracil
  modified_base 125..126: mod_base = OTHER; note = uracil
  modified_base 128: mod_base = OTHER; note = uracil
  modified_base 136: mod_base = OTHER; note = uracil
  modified_base 138: mod_base = OTHER; note = uracil
  modified_base 140: mod_base = OTHER; note = uracil
  modified_base 148: mod_base = OTHER; note = uracil
  modified_base 156: mod_base = OTHER; note = uracil
  modified_base 163: mod_base = OTHER; note = uracil
  modified_base 190: mod_base = OTHER; note = uracil
  modified_base 192: mod_base = OTHER; note = uracil
  modified_base 199: mod_base = OTHER; note = uracil
  modified_base 205: mod_base = OTHER; note = uracil
  modified_base 208: mod_base = OTHER; note = uracil
  modified_base 211..214: mod_base = OTHER; note = uracil
  modified_base 219..220: mod_base = OTHER; note = uracil
  modified_base 229..230: mod_base = OTHER; note = uracil
  modified_base 234: mod_base = OTHER; note = uracil
  modified_base 238: mod_base = OTHER; note = uracil
  modified_base 242..243: mod_base = OTHER; note = uracil
  modified_base 247..248: mod_base = OTHER; note = uracil
  modified_base 250: mod_base = OTHER; note = uracil
  modified_base 257: mod_base = OTHER; note = uracil
  modified_base 260..261: mod_base = OTHER; note = uracil
  modified_base 264: mod_base = OTHER; note = uracil
  modified_base 269: mod_base = OTHER; note = uracil
  modified_base 274: mod_base = OTHER; note = uracil
  modified_base 278: mod_base = OTHER; note = uracil
  modified_base 280: mod_base = OTHER; note = uracil
  modified_base 284: mod_base = OTHER; note = uracil
  modified_base 286: mod_base = OTHER; note = uracil
  modified_base 289: mod_base = OTHER; note = uracil
  modified_base 295..296: mod_base = OTHER; note = uracil
  modified_base 298: mod_base = OTHER; note = uracil
  modified_base 82: mod_base = m5c
  modified_base 93: mod_base = m5c
  modified_base 104: mod_base = m5c
  modified_base 129: mod_base = m5c
  modified_base 193: mod_base = m5c
  modified_base 244: mod_base = m5c
  modified_base 272: mod_base = m5c
  variation 151: note = CpG site, residue is C if methylated or T(=U) if unmethylated
tgattgtattttatgagtatgtagtagggttattatatattttttgtttttgggttttttttttgtgtgtagtttaggtttcggtttgtgttcgagggttagacggttttatggtttttagtttttttcgtagattatatagggaggtagygaggtagggtgtaaggatgttaggggtggaaggggtgatatcgggagtaaagattgttattttttggtttggataaatttgtttgatattttcgatttttgaagttatttattatggttgcgttggtttagatattttaagggttatttt

SEQ ID NO: 94 - DNA, 301 bp, synthetic construct
  source 1..301: mol_type = other DNA
  modified_base 8..10: mod_base = OTHER; note = uracil
  modified_base 20: mod_base = OTHER; note = uracil
  modified_base 25..26: mod_base = OTHER; note = uracil
  modified_base 31: mod_base = OTHER; note = uracil
  modified_base 34..35: mod_base = OTHER; note = uracil
  modified_base 47: mod_base = OTHER; note = uracil
  modified_base 50: mod_base = OTHER; note = uracil
  modified_base 66: mod_base = OTHER; note = uracil
  modified_base 70: mod_base = OTHER; note = uracil
  modified_base 79..80: mod_base = OTHER; note = uracil
  modified_base 84..85: mod_base = OTHER; note = uracil
  modified_base 95: mod_base = OTHER; note = uracil
  modified_base 99: mod_base = OTHER; note = uracil
  modified_base 104: mod_base = OTHER; note = uracil
  modified_base 106..107: mod_base = OTHER; note = uracil
  modified_base 114: mod_base = OTHER; note = uracil
  modified_base 116..119: mod_base = OTHER; note = uracil
  modified_base 122..123: mod_base = OTHER; note = uracil
  modified_base 125..128: mod_base = OTHER; note = uracil
  modified_base 132: mod_base = OTHER; note = uracil
  modified_base 135..136: mod_base = OTHER; note = uracil
  modified_base 140: mod_base = OTHER; note = uracil
  modified_base 142..144: mod_base = OTHER; note = uracil
  modified_base 147..148: mod_base = OTHER; note = uracil
  modified_base 152: mod_base = OTHER; note = uracil
  modified_base 155..156: mod_base = OTHER; note = uracil
  modified_base 158..160: mod_base = OTHER; note = uracil
  modified_base 169: mod_base = OTHER; note = uracil
  modified_base 181: mod_base = OTHER; note = uracil
  modified_base 188..189: mod_base = OTHER; note = uracil
  modified_base 196: mod_base = OTHER; note = uracil
  modified_base 200: mod_base = OTHER; note = uracil
  modified_base 204..206: mod_base = OTHER; note = uracil
  modified_base 212: mod_base = OTHER; note = uracil
  modified_base 214: mod_base = OTHER; note = uracil
  modified_base 218: mod_base = OTHER; note = uracil
  modified_base 224..225: mod_base = OTHER; note = uracil
  modified_base 230: mod_base = OTHER; note = uracil
  modified_base 233: mod_base = OTHER; note = uracil
  modified_base 235: mod_base = OTHER; note = uracil
  modified_base 237: mod_base = OTHER; note = uracil
  modified_base 248..250: mod_base = OTHER; note = uracil
  modified_base 256: mod_base = OTHER; note = uracil
  modified_base 273..275: mod_base = OTHER; note = uracil
  modified_base 278: mod_base = OTHER; note = uracil
  modified_base 281: mod_base = OTHER; note = uracil
  modified_base 285: mod_base = OTHER; note = uracil
  modified_base 287: mod_base = OTHER; note = uracil
  modified_base 296: mod_base = OTHER; note = uracil
  modified_base 300: mod_base = OTHER; note = uracil
  modified_base 29: mod_base = m5c
  modified_base 57: mod_base = m5c
  modified_base 108: mod_base = m5c
  modified_base 172: mod_base = m5c
  modified_base 197: mod_base = m5c
  modified_base 208: mod_base = m5c
  modified_base 219: mod_base = m5c
  variation 150: note = CpG site, residue is C if methylated or T(=U) if unmethylated
aaagtggtttttgaagtgtttgagttagcgtagttatgatggatgattttagaggtcgggaatgttagataggtttatttaggttaaggggtagtagtttttgttttcggtgttattttttttatttttaatatttttgtattttgtttygttgtttttttgtgtgatttacggaggaaattggggattatagggtcgtttggttttcgagtataaatcggggtttgggttatatataggggaggggtttaggagtaaaaggtgtgtggtgattttgttgtatatttataaaatatagtta

SEQ ID NO: 95 - DNA, 300 bp, synthetic construct
  source 1..300: mol_type = other DNA
  modified_base 1: mod_base = OTHER; note = uracil
  modified_base 3: mod_base = OTHER; note = uracil
  modified_base 5: mod_base = OTHER; note = uracil
  modified_base 7..8: mod_base = OTHER; note = uracil
  modified_base 12: mod_base = OTHER; note = uracil
  modified_base 25: mod_base = OTHER; note = uracil
  modified_base 32..34: mod_base = OTHER; note = uracil
  modified_base 37: mod_base = OTHER; note = uracil
  modified_base 43: mod_base = OTHER; note = uracil
  modified_base 48: mod_base = OTHER; note = uracil
  modified_base 52: mod_base = OTHER; note = uracil
  modified_base 56..57: mod_base = OTHER; note = uracil
  modified_base 61..64: mod_base = OTHER; note = uracil
  modified_base 66: mod_base = OTHER; note = uracil
  modified_base 68: mod_base = OTHER; note = uracil
  modified_base 70: mod_base = OTHER; note = uracil
  modified_base 74: mod_base = OTHER; note = uracil
  modified_base 81..82: mod_base = OTHER; note = uracil
  modified_base 85: mod_base = OTHER; note = uracil
  modified_base 88: mod_base = OTHER; note = uracil
  modified_base 90..92: mod_base = OTHER; note = uracil
  modified_base 99: mod_base = OTHER; note = uracil
  modified_base 102: mod_base = OTHER; note = uracil
  modified_base 105: mod_base = OTHER; note = uracil
  modified_base 107..108: mod_base = OTHER; note = uracil
  modified_base 117: mod_base = OTHER; note = uracil
  modified_base 120: mod_base = OTHER; note = uracil
  modified_base 124..125: mod_base = OTHER; note = uracil
  modified_base 129: mod_base = OTHER; note = uracil
  modified_base 132: mod_base = OTHER; note = uracil
  modified_base 135: mod_base = OTHER; note = uracil
  modified_base 141: mod_base = OTHER; note = uracil
  modified_base 144: mod_base = OTHER; note = uracil
  modified_base 156: mod_base = OTHER; note = uracil
  modified_base 159..160: mod_base = OTHER; note = uracil
  modified_base 167..168: mod_base = OTHER; note = uracil
  modified_base 172: mod_base = OTHER; note = uracil
  modified_base 184: mod_base = OTHER; note = uracil
  modified_base 187..188: mod_base = OTHER; note = uracil
  modified_base 192: mod_base = OTHER; note = uracil
  modified_base 195: mod_base = OTHER; note = uracil
  modified_base 201: mod_base = OTHER; note = uracil
  modified_base 222: mod_base = OTHER; note = uracil
  modified_base 232..233: mod_base = OTHER; note = uracil
  modified_base 237..239: mod_base = OTHER; note = uracil
  modified_base 244: mod_base = OTHER; note = uracil
  modified_base 258: mod_base = OTHER; note = uracil
  modified_base 261..262: mod_base = OTHER; note = uracil
  modified_base 265..266: mod_base = OTHER; note = uracil
  modified_base 272: mod_base = OTHER; note = uracil
  modified_base 282: mod_base = OTHER; note = uracil
  modified_base 287..288: mod_base = OTHER; note = uracil
  modified_base 293: mod_base = OTHER; note = uracil
  modified_base 297: mod_base = OTHER; note = uracil
  modified_base 23: mod_base = m5c
  modified_base 49: mod_base = m5c
  modified_base 93: mod_base = m5c
  modified_base 161: mod_base = m5c
  modified_base 165: mod_base = m5c
  modified_base 180: mod_base = m5c
  modified_base 198: mod_base = m5c
  modified_base 223: mod_base = m5c
  variation 151: note = CpG site, residue is C if methylated or T(=U) if unmethylated
tatatattttttagttgaggggcgttgaggtttttgttgttgttgtgtcgtttgatttgttttttttttttgatagagagttagttgtttttcgggaataattttattaatgagtgtaatatattaggtaattttatgtgtagtaatggayggtgtatttcgggcgtttggtagtgtgacgggttgtttgattgtttcgataagagtgatgagaaggagtgtcgtgagtggtttggttttttgttggggtggggtggtagttattttggggtagaggggagtaggttttgagtaggttta

SEQ ID NO: 96 - DNA, 300 bp, synthetic construct
  source 1..300: mol_type = other DNA
  modified_base 5..6: mod_base = OTHER; note = uracil
  modified_base 9: mod_base = OTHER; note = uracil
  modified_base 11: mod_base = OTHER; note = uracil
  modified_base 16..17: mod_base = OTHER; note = uracil
  modified_base 20: mod_base = OTHER; note = uracil
  modified_base 22..25: mod_base = OTHER; note = uracil
  modified_base 27: mod_base = OTHER; note = uracil
  modified_base 30..33: mod_base = OTHER; note = uracil
  modified_base 41: mod_base = OTHER; note = uracil
  modified_base 44..45: mod_base = OTHER; note = uracil
  modified_base 47..50: mod_base = OTHER; note = uracil
  modified_base 52..55: mod_base = OTHER; note = uracil
  modified_base 58: mod_base = OTHER; note = uracil
  modified_base 65..66: mod_base = OTHER; note = uracil
  modified_base 70..71: mod_base = OTHER; note = uracil
  modified_base 73: mod_base = OTHER; note = uracil
  modified_base 75: mod_base = OTHER; note = uracil
  modified_base 80: mod_base = OTHER; note = uracil
  modified_base 82: mod_base = OTHER; note = uracil
  modified_base 84..85: mod_base = OTHER; note = uracil
  modified_base 88: mod_base = OTHER; note = uracil
  modified_base 90: mod_base = OTHER; note = uracil
  modified_base 93: mod_base = OTHER; note = uracil
  modified_base 95: mod_base = OTHER; note = uracil
  modified_base 97: mod_base = OTHER; note = uracil
  modified_base 107: mod_base = OTHER; note = uracil
  modified_base 111: mod_base = OTHER; note = uracil
  modified_base 115: mod_base = OTHER; note = uracil
  modified_base 118..119: mod_base = OTHER; note = uracil
  modified_base 123: mod_base = OTHER; note = uracil
  modified_base 125: mod_base = OTHER; note = uracil
  modified_base 127: mod_base = OTHER; note = uracil
  modified_base 130..131: mod_base = OTHER; note = uracil
  modified_base 137..138: mod_base = OTHER; note = uracil
  modified_base 146: mod_base = OTHER; note = uracil
  modified_base 148: mod_base = OTHER; note = uracil
  modified_base 152..153: mod_base = OTHER; note = uracil
  modified_base 158: mod_base = OTHER; note = uracil
  modified_base 161: mod_base = OTHER; note = uracil
  modified_base 163: mod_base = OTHER; note = uracil
  modified_base 173..174: mod_base = OTHER; note = uracil
  modified_base 185: mod_base = OTHER; note = uracil
  modified_base 187: mod_base = OTHER; note = uracil
  modified_base 189: mod_base = OTHER; note = uracil
  modified_base 205..206: mod_base = OTHER; note = uracil
  modified_base 214: mod_base = OTHER; note = uracil
  modified_base 217: mod_base = OTHER; note = uracil
  modified_base 221: mod_base = OTHER; note = uracil
  modified_base 223: mod_base = OTHER; note = uracil
  modified_base 225: mod_base = OTHER; note = uracil
  modified_base 229: mod_base = OTHER; note = uracil
  modified_base 242: mod_base = OTHER; note = uracil
  modified_base 247: mod_base = OTHER; note = uracil
  modified_base 254: mod_base = OTHER; note = uracil
  modified_base 256: mod_base = OTHER; note = uracil
  modified_base 259: mod_base = OTHER; note = uracil
  modified_base 262: mod_base = OTHER; note = uracil
  modified_base 265: mod_base = OTHER; note = uracil
  modified_base 271..272: mod_base = OTHER; note = uracil
  modified_base 274: mod_base = OTHER; note = uracil
  modified_base 279..282: mod_base = OTHER; note = uracil
  modified_base 284: mod_base = OTHER; note = uracil
  modified_base 287: mod_base = OTHER; note = uracil
  modified_base 77: mod_base = m5c
  modified_base 102: mod_base = m5c
  modified_base 120: mod_base = m5c
  modified_base 135: mod_base = m5c
  modified_base 139: mod_base = m5c
  modified_base 207: mod_base = m5c
  modified_base 251: mod_base = m5c
  modified_base 277: mod_base = m5c
  variation 149: note = CpG site, residue is C if methylated or T(=U) if unmethylated
taagtttgtttaggatttgtttttttttgttttaggatggttgttattttattttagtaaagggttaggttatttacggtatttttttttattatttttgtcgaagtagttaggtagttcgttatattgttaggcgttcgggatgtatygtttattgttgtatatgaagttgtttggtatgttgtatttattggtgaagttgttttcggggagtagttggttttttgttagagagaggggataggttagacggtatagtaatagtagggattttagcgttttttaattgaaaggtgtgtg

SEQ ID NO: 97 - DNA, 300 bp, synthetic construct
  source 1..300: mol_type = other DNA
  modified_base 1: mod_base = OTHER; note = uracil
  modified_base 5: mod_base = OTHER; note = uracil
  modified_base 25: mod_base = OTHER; note = uracil
  modified_base 29..30: mod_base = OTHER; note = uracil
  modified_base 38: mod_base = OTHER; note = uracil
  modified_base 40: mod_base = OTHER; note = uracil
  modified_base 42: mod_base = OTHER; note = uracil
  modified_base 47: mod_base = OTHER; note = uracil
  modified_base 49: mod_base = OTHER; note = uracil
  modified_base 58: mod_base = OTHER; note = uracil
  modified_base 65: mod_base = OTHER; note = uracil
  modified_base 71: mod_base = OTHER; note = uracil
  modified_base 73: mod_base = OTHER; note = uracil
  modified_base 77..78: mod_base = OTHER; note = uracil
  modified_base 85: mod_base = OTHER; note = uracil
  modified_base 87: mod_base = OTHER; note = uracil
  modified_base 90: mod_base = OTHER; note = uracil
  modified_base 92: mod_base = OTHER; note = uracil
  modified_base 102: mod_base = OTHER; note = uracil
  modified_base 112: mod_base = OTHER; note = uracil
  modified_base 117: mod_base = OTHER; note = uracil
  modified_base 119: mod_base = OTHER; note = uracil
  modified_base 125..127: mod_base = OTHER; note = uracil
  modified_base 138: mod_base = OTHER; note = uracil
  modified_base 140..141: mod_base = OTHER; note = uracil
  modified_base 144..145: mod_base = OTHER; note = uracil
  modified_base 149..150: mod_base = OTHER; note = uracil
  modified_base 153: mod_base = OTHER; note = uracil
  modified_base 163..165: mod_base = OTHER; note = uracil
  modified_base 169: mod_base = OTHER; note = uracil
  modified_base 171: mod_base = OTHER; note = uracil
  modified_base 174: mod_base = OTHER; note = uracil
  modified_base 183: mod_base = OTHER; note = uracil
  modified_base 193: mod_base = OTHER; note = uracil
  modified_base 212..213: mod_base = OTHER; note = uracil
  modified_base 220..222: mod_base = OTHER; note = uracil
  modified_base 225: mod_base = OTHER; note = uracil
  modified_base 228: mod_base = OTHER; note = uracil
  modified_base 237: mod_base = OTHER; note = uracil
  modified_base 243: mod_base = OTHER; note = uracil
  modified_base 252: mod_base = OTHER; note = uracil
  modified_base 254..255: mod_base = OTHER; note = uracil
  modified_base 260..261: mod_base = OTHER; note = uracil
  modified_base 269: mod_base = OTHER; note = uracil
  modified_base 275: mod_base = OTHER; note = uracil
  modified_base 278: mod_base = OTHER; note = uracil
  modified_base 285..286: mod_base = OTHER; note = uracil
  modified_base 296..297: mod_base = OTHER; note = uracil
  modified_base 299: mod_base = OTHER; note = uracil
  modified_base 32: mod_base = m5c
  modified_base 59: mod_base = m5c
  modified_base 63: mod_base = m5c
  modified_base 74: mod_base = m5c
  modified_base 108: mod_base = m5c
  modified_base 194: mod_base = m5c
  modified_base 206: mod_base = m5c
  modified_base 208: mod_base = m5c
  variation 135: note = CpG site, residue is C if methylated or T(=U) if unmethylated
  variation 155: note = CpG site, residue is C if methylated or T(=U) if unmethylated
  variation 158: note = CpG site, residue is C if methylated or T(=U) if unmethylated
  variation 166: note = CpG site, residue is C if methylated or T(=U) if unmethylated
tatgtattttgtgtttgtagtgtgttggttacgggagtattttaaatatattatgggtcgggcgtagtggtttcggtttgtaattttagtattttgggaggttgaggcgggtagattatttgagtttaggagttygatattagtttggttaatayggygaaatttygtttttattaaaaatataaaaattaatcgggtgtgatggcgcgtgtttgtatttttagttattagggaggttgaggtaggagaattttttgaatttgggaggtagggattgtagtgagttaagattgtgttatt

SEQ ID NO: 98 - DNA, 300 bp, synthetic construct
  source 1..300: mol_type = other DNA
  modified_base 6: mod_base = OTHER; note = uracil
  modified_base 8: mod_base = OTHER; note = uracil
  modified_base 12: mod_base = OTHER; note = uracil
  modified_base 17: mod_base = OTHER; note = uracil
  modified_base 19: mod_base = OTHER; note = uracil
  modified_base 21: mod_base = OTHER; note = uracil
  modified_base 24: mod_base = OTHER; note = uracil
  modified_base 28..30: mod_base = OTHER; note = uracil
  modified_base 33..34: mod_base = OTHER; note = uracil
  modified_base 36..38: mod_base = OTHER; note = uracil
  modified_base 44: mod_base = OTHER; note = uracil
  modified_base 53: mod_base = OTHER; note = uracil
  modified_base 55..56: mod_base = OTHER; note = uracil
  modified_base 59..60: mod_base = OTHER; note = uracil
  modified_base 62: mod_base = OTHER; note = uracil
  modified_base 65..66: mod_base = OTHER; note = uracil
  modified_base 68..70: mod_base = OTHER; note = uracil
  modified_base 77: mod_base = OTHER; note = uracil
  modified_base 86: mod_base = OTHER; note = uracil
  modified_base 90: mod_base = OTHER; note = uracil
  modified_base 96..97: mod_base = OTHER; note = uracil
  modified_base 100: mod_base = OTHER; note = uracil
  modified_base 102: mod_base = OTHER; note = uracil
  modified_base 104..105: mod_base = OTHER; note = uracil
  modified_base 144: mod_base = OTHER; note = uracil
  modified_base 153..154: mod_base = OTHER; note = uracil
  modified_base 158: mod_base = OTHER; note = uracil
  modified_base 169: mod_base = OTHER; note = uracil
  modified_base 171..172: mod_base = OTHER; note = uracil
  modified_base 177: mod_base = OTHER; note = uracil
  modified_base 179: mod_base = OTHER; note = uracil
  modified_base 187: mod_base = OTHER; note = uracil
  modified_base 190..191: mod_base = OTHER; note = uracil
  modified_base 194..195: mod_base = OTHER; note = uracil
  modified_base 197: mod_base = OTHER; note = uracil
  modified_base 200..201: mod_base = OTHER; note = uracil
  modified_base 203..205: mod_base = OTHER; note = uracil
  modified_base 212: mod_base = OTHER; note = uracil
  modified_base 221: mod_base = OTHER; note = uracil
  modified_base 225: mod_base = OTHER; note = uracil
  modified_base 231..232: mod_base = OTHER; note = uracil
  modified_base 234: mod_base = OTHER; note = uracil
  modified_base 239..240: mod_base = OTHER; note = uracil
  modified_base 244..246: mod_base = OTHER; note = uracil
  modified_base 264: mod_base = OTHER; note = uracil
  modified_base 266..267: mod_base = OTHER; note = uracil
  modified_base 273..274: mod_base = OTHER; note = uracil
  modified_base 277: mod_base = OTHER; note = uracil
  modified_base 279: mod_base = OTHER; note = uracil
  modified_base 281: mod_base = OTHER; note = uracil
  modified_base 284: mod_base = OTHER; note = uracil
  modified_base 288: mod_base = OTHER; note = uracil
  modified_base 290: mod_base = OTHER; note = uracil
  modified_base 297: mod_base = OTHER; note = uracil
  modified_base 92: mod_base = m5c
  modified_base 94: mod_base = m5c
  modified_base 106: mod_base = m5c
  modified_base 192: mod_base = m5c
  modified_base 226: mod_base = m5c
  modified_base 237: mod_base = m5c
  modified_base 241: mod_base = m5c
  modified_base 268: mod_base = m5c
  variation 134: note = CpG site, residue is C if methylated or T(=U) if unmethylated
  variation 142: note = CpG site, residue is C if methylated or T(=U) if unmethylated
  variation 145: note = CpG site, residue is C if methylated or T(=U) if unmethylated
  variation 165: note = CpG site, residue is C if methylated or T(=U) if unmethylated
agtggtataattttggtttattgtagtttttgttttttaggtttaggagatttttttgttttagtttttttagtagttgggaatataggtacgcgttattatattcggttaatttttgtatttttagtagagayggggtttygtygtgttggttaggttggtgtygaatttttgggtttaagtgatttgttcgttttagttttttaaagtgttgagattataggtcggagttattgcgttcggtttataatgtgtttagagtgttttcgtggttagtatattataaatataaaatgtatg

SEQ ID NO: 99 - DNA, 300 bp, synthetic construct
  source 1..300: mol_type = other DNA
  modified_base 4: mod_base = OTHER; note = uracil
  modified_base 11..14: mod_base = OTHER; note = uracil
  modified_base 26: mod_base = OTHER; note = uracil
  modified_base 33: mod_base = OTHER; note = uracil
  modified_base 42: mod_base = OTHER; note = uracil
  modified_base 47: mod_base = OTHER; note = uracil
  modified_base 50: mod_base = OTHER; note = uracil
  modified_base 60..63: mod_base = OTHER; note = uracil
  modified_base 66..67: mod_base = OTHER; note = uracil
  modified_base 71..72: mod_base = OTHER; note = uracil
  modified_base 81: mod_base = OTHER; note = uracil
  modified_base 83..85: mod_base = OTHER; note = uracil
  modified_base 90..91: mod_base = OTHER; note = uracil
  modified_base 94: mod_base = OTHER; note = uracil
  modified_base 99: mod_base = OTHER; note = uracil
  modified_base 102..103: mod_base = OTHER; note = uracil
  modified_base 106..107: mod_base = OTHER; note = uracil
  modified_base 109..110: mod_base = OTHER; note = uracil
  modified_base 112..113: mod_base = OTHER; note = uracil
  modified_base 115: mod_base = OTHER; note = uracil
  modified_base 117: mod_base = OTHER; note = uracil
  modified_base 119..120: mod_base = OTHER; note = uracil
  modified_base 122..123: mod_base = OTHER; note = uracil
  modified_base 125: mod_base = OTHER; note = uracil
  modified_base 129: mod_base = OTHER; note = uracil
  modified_base 131..132: mod_base = OTHER; note = uracil
  modified_base 134: mod_base = OTHER; note = uracil
  modified_base 136..138: mod_base = OTHER; note = uracil
  modified_base 140..141: mod_base = OTHER; note = uracil
  modified_base 143: mod_base = OTHER; note = uracil
  modified_base 145..146: mod_base = OTHER; note = uracil
  modified_base 148: mod_base = OTHER; note = uracil
  modified_base 152: mod_base = OTHER; note = uracil
  modified_base 156: mod_base = OTHER; note = uracil
  modified_base 158: mod_base = OTHER; note = uracil
  modified_base 160..162: mod_base = OTHER; note = uracil
  modified_base 167: mod_base = OTHER; note = uracil
  modified_base 174: mod_base = OTHER; note = uracil
  modified_base 185: mod_base = OTHER; note = uracil
  modified_base 188: mod_base = OTHER; note = uracil
  modified_base 196..197: mod_base = OTHER; note = uracil
  modified_base 201..203: mod_base = OTHER; note = uracil
  modified_base 205: mod_base = OTHER; note = uracil
  modified_base 207: mod_base = OTHER; note = uracil
  modified_base 221: mod_base = OTHER; note = uracil
  modified_base 228..230: mod_base = OTHER; note = uracil
  modified_base 234: mod_base = OTHER; note = uracil
  modified_base 236: mod_base = OTHER; note = uracil
  modified_base 242: mod_base = OTHER; note = uracil
  modified_base 245: mod_base = OTHER; note = uracil
  modified_base 247..249: mod_base = OTHER; note = uracil
  modified_base 251: mod_base = OTHER; note = uracil
  modified_base 253: mod_base = OTHER; note = uracil
  modified_base 258..260: mod_base = OTHER; note = uracil
  modified_base 264: mod_base = OTHER; note = uracil
  modified_base 271: mod_base = OTHER; note = uracil
  modified_base 279: mod_base = OTHER; note = uracil
  modified_base 287..288: mod_base = OTHER; note = uracil
  modified_base 290: mod_base = OTHER; note = uracil
  modified_base 293: mod_base = OTHER; note = uracil
  modified_base 296: mod_base = OTHER; note = uracil
  modified_base 74: mod_base = m5c
  modified_base 153: mod_base = m5c
  modified_base 164: mod_base = m5c
  modified_base 168: mod_base = m5c
  modified_base 198: mod_base = m5c
  modified_base 231: mod_base = m5c
  variation 126: note = CpG site, residue is C if methylated or T(=U) if unmethylated
  variation 175: note = CpG site, residue is C if methylated or T(=U) if unmethylated
ggattgtgggttttttggtttgtgtttgaaagttgggggtatagttttgtatgggttggtttttgttttatttcgggaagtttttagagtttgttgggtagtttgttttttttttttatttttttygtttttattttttttttattatatttcggtttttttacggtcggaggtygtgaatgggttgttttgttgttcggtttatataggaggatggtggtagaagatttcggtataaagttagtatttattttgtttttaggttgggtttagggaggttgaaaagttattttagttgtg

SEQ ID NO: 100 - DNA, 300 bp, synthetic construct
  source 1..300: mol_type = other DNA
  modified_base 1: mod_base = OTHER; note = uracil
  modified_base 3: mod_base = OTHER; note = uracil
  modified_base 6: mod_base = OTHER; note = uracil
  modified_base 15: mod_base = OTHER; note = uracil
  modified_base 20: mod_base = OTHER; note = uracil
  modified_base 23..24: mod_base = OTHER; note = uracil
  modified_base 26..28: mod_base = OTHER; note = uracil
  modified_base 33..35: mod_base = OTHER; note = uracil
  modified_base 38..39: mod_base = OTHER; note = uracil
  modified_base 46: mod_base = OTHER; note = uracil
  modified_base 57: mod_base = OTHER; note = uracil
  modified_base 61: mod_base = OTHER; note = uracil
  modified_base 68: mod_base = OTHER; note = uracil
  modified_base 75: mod_base = OTHER; note = uracil
  modified_base 78: mod_base = OTHER; note = uracil
  modified_base 81..82: mod_base = OTHER; note = uracil
  modified_base 84..85: mod_base = OTHER; note = uracil
  modified_base 88..89: mod_base = OTHER; note = uracil
  modified_base 91..92: mod_base = OTHER; note = uracil
  modified_base 101: mod_base = OTHER; note = uracil
  modified_base 106: mod_base = OTHER; note = uracil
  modified_base 109: mod_base = OTHER; note = uracil
  modified_base 114: mod_base = OTHER; note = uracil
  modified_base 117..119: mod_base = OTHER; note = uracil
  modified_base 123: mod_base = OTHER; note = uracil
  modified_base 128..129: mod_base = OTHER; note = uracil
  modified_base 131: mod_base = OTHER; note = uracil
  modified_base 135: mod_base = OTHER; note = uracil
  modified_base 146: mod_base = OTHER; note = uracil
  modified_base 196: mod_base = OTHER; note = uracil
  modified_base 200: mod_base = OTHER; note = uracil
  modified_base 203..205: mod_base = OTHER; note = uracil
  modified_base 208: mod_base = OTHER; note = uracil
  modified_base 212: mod_base = OTHER; note = uracil
  modified_base 214: mod_base = OTHER; note = uracil
  modified_base 221: mod_base = OTHER; note = uracil
  modified_base 224..225: mod_base = OTHER; note = uracil
  modified_base 236: mod_base = OTHER; note = uracil
  modified_base 242..243: mod_base = OTHER; note = uracil
  modified_base 246..248: mod_base = OTHER; note = uracil
  modified_base 252: mod_base = OTHER; note = uracil
  modified_base 257: mod_base = OTHER; note = uracil
  modified_base 262..266: mod_base = OTHER; note = uracil
  modified_base 269: mod_base = OTHER; note = uracil
  modified_base 273: mod_base = OTHER; note = uracil
  modified_base 277: mod_base = OTHER; note = uracil
  modified_base 279: mod_base = OTHER; note = uracil
  modified_base 283..284: mod_base = OTHER; note = uracil
  modified_base 291..293: mod_base = OTHER; note = uracil
  modified_base 295: mod_base = OTHER; note = uracil
  modified_base 299..300: mod_base = OTHER; note = uracil
  modified_base 69: mod_base = m5c
  modified_base 102: mod_base = m5c
  modified_base 125: mod_base = m5c
  modified_base 132: mod_base = m5c
  modified_base 136: mod_base = m5c
  modified_base 147: mod_base = m5c
  modified_base 174: mod_base = m5c
  modified_base 226: mod_base = m5c
tatagttgaagtggttttttagtttttttgaatttagtttgggaatagagtgggtgttgattttgtgtcggggttttttgttattatttttttgtgtgggtcgggtaataaagtagtttatttacggttttcggtcgtgggagagtcggaatgtggtgaggagggagtggagacggaggaggtgagaggaggaggtaggttgtttagtaggttttgggagtttttcgaggtaaggtaggggttaatttatgtagaattgtatttttagtttttagatataaattaaggggtttatagttt

SEQ ID NO: 101 - DNA, 301 bp, synthetic construct
  source 1..301: mol_type = other DNA
  modified_base 3: mod_base = OTHER; note = uracil
  modified_base 5: mod_base = OTHER; note = uracil
  modified_base 7: mod_base = OTHER; note = uracil
  modified_base 19..20: mod_base = OTHER; note = uracil
  modified_base 36..37: mod_base = OTHER; note = uracil
  modified_base 39: mod_base = OTHER; note = uracil
  modified_base 41: mod_base = OTHER; note = uracil
  modified_base 46..47: mod_base = OTHER; note = uracil
  modified_base 52..54: mod_base = OTHER; note = uracil
  modified_base 57: mod_base = OTHER; note = uracil
  modified_base 62..63: mod_base = OTHER; note = uracil
  modified_base 71: mod_base = OTHER; note = uracil
  modified_base 76: mod_base = OTHER; note = uracil
  modified_base 78..79: mod_base = OTHER; note = uracil
  modified_base 83: mod_base = OTHER; note = uracil
  modified_base 87..88: mod_base = OTHER; note = uracil
  modified_base 90..92: mod_base = OTHER; note = uracil
  modified_base 96: mod_base = OTHER; note = uracil
  modified_base 101: mod_base = OTHER; note = uracil
  modified_base 106: mod_base = OTHER; note = uracil
  modified_base 109: mod_base = OTHER; note = uracil
  modified_base 111: mod_base = OTHER; note = uracil
  modified_base 117..118: mod_base = OTHER; note = uracil
  modified_base 121: mod_base = OTHER; note = uracil
  modified_base 127..128: mod_base = OTHER; note = uracil
  modified_base 130: mod_base = OTHER; note = uracil
  modified_base 136..138: mod_base = OTHER; note = uracil
  modified_base 142..143: mod_base = OTHER; note = uracil
  modified_base 152..153: mod_base = OTHER; note = uracil
  modified_base 155: mod_base = OTHER; note = uracil
  modified_base 157..159: mod_base = OTHER; note = uracil
  modified_base 163..164: mod_base = OTHER; note = uracil
  modified_base 168: mod_base = OTHER; note = uracil
  modified_base 174: mod_base = OTHER; note = uracil
  modified_base 191: mod_base = OTHER; note = uracil
  modified_base 194: mod_base = OTHER; note = uracil
  modified_base 201: mod_base = OTHER; note = uracil
  modified_base 203: mod_base = OTHER; note = uracil
  modified_base 209: mod_base = OTHER; note = uracil
  modified_base 217: mod_base = OTHER; note = uracil
  modified_base 219: mod_base = OTHER; note = uracil
  modified_base 222: mod_base = OTHER; note = uracil
  modified_base 224: mod_base = OTHER; note = uracil
  modified_base 230: mod_base = OTHER; note = uracil
  modified_base 235..238: mod_base = OTHER; note = uracil
  modified_base 241..242: mod_base = OTHER; note = uracil
  modified_base 246..247: mod_base = OTHER; note = uracil
  modified_base 249: mod_base = OTHER; note = uracil
  modified_base 251: mod_base = OTHER; note = uracil
  modified_base 256: mod_base = OTHER; note = uracil
  modified_base 259: mod_base = OTHER; note = uracil
  modified_base 263..264: mod_base = OTHER; note = uracil
  modified_base 269..271: mod_base = OTHER; note = uracil
  modified_base 273: mod_base = OTHER; note = uracil
  modified_base 277: mod_base = OTHER; note = uracil
  modified_base 279..280: mod_base = OTHER; note = uracil
  modified_base 282..283: mod_base = OTHER; note = uracil
  modified_base 55: mod_base = m5c
  modified_base 84: mod_base = m5c
  modified_base 94: mod_base = m5c
  modified_base 160: mod_base = m5c
  modified_base 169: mod_base = m5c
  modified_base 171: mod_base = m5c
  variation 150: note = CpG site, residue is C if methylated or T(=U) if unmethylated
tatttttttgatgtatgattttggatgtgatttagtttttttgggttttggtttcgttgaattatgtgattagagtattaagtcggttttttacgttggtttgagttgtttaagggttatttaggttttttttgttttaagttagaggtygttttttttcggttaagtcgcggttatgggggtggtggtataatagagagtatagggattttggaatataatattgggttatgatttttgtttggttatttttggttgttgattttgattttttgtttttttttttgtgaatggggggagt

SEQ ID NO: 102 - DNA, 301 bp, synthetic construct
  source 1..301: mol_type = other DNA
  modified_base 2: mod_base = OTHER; note = uracil
  modified_base 4..9: mod_base = OTHER; note = uracil
  modified_base 13: mod_base = OTHER; note = uracil
  modified_base 15: mod_base = OTHER; note = uracil
  modified_base 27: mod_base = OTHER; note = uracil
  modified_base 35: mod_base = OTHER; note = uracil
  modified_base 41: mod_base = OTHER; note = uracil
  modified_base 44: mod_base = OTHER; note = uracil
  modified_base 47..48: mod_base = OTHER; note = uracil
  modified_base 57..58: mod_base = OTHER; note = uracil
  modified_base 62: mod_base = OTHER; note = uracil
  modified_base 69: mod_base = OTHER; note = uracil
  modified_base 74..76: mod_base = OTHER; note = uracil
  modified_base 88..89: mod_base = OTHER; note = uracil
  modified_base 95..97: mod_base = OTHER; note = uracil
  modified_base 102: mod_base = OTHER; note = uracil
  modified_base 104: mod_base = OTHER; note = uracil
  modified_base 106: mod_base = OTHER; note = uracil
  modified_base 114..115: mod_base = OTHER; note = uracil
  modified_base 117..118: mod_base = OTHER; note = uracil
  modified_base 120..124: mod_base = OTHER; note = uracil
  modified_base 129: mod_base = OTHER; note = uracil
  modified_base 135: mod_base = OTHER; note = uracil
  modified_base 140: mod_base = OTHER; note = uracil
  modified_base 154..155: mod_base = OTHER; note = uracil
  modified_base 157: mod_base = OTHER; note = uracil
  modified_base 161: mod_base = OTHER; note = uracil
  modified_base 168: mod_base = OTHER; note = uracil
  modified_base 177..178: mod_base = OTHER; note = uracil
  modified_base 186..188: mod_base = OTHER; note = uracil
  modified_base 194: mod_base = OTHER; note = uracil
  modified_base 197: mod_base = OTHER; note = uracil
  modified_base 199: mod_base = OTHER; note = uracil
  modified_base 203..204: mod_base = OTHER; note = uracil
  modified_base 216: mod_base = OTHER; note = uracil
  modified_base 220: mod_base = OTHER; note = uracil
  modified_base 227: mod_base = OTHER; note = uracil
  modified_base 229: mod_base = OTHER; note = uracil
  modified_base 234: mod_base = OTHER; note = uracil
  modified_base 236: mod_base = OTHER; note = uracil
  modified_base 243: mod_base = OTHER; note = uracil
  modified_base 251..252: mod_base = OTHER; note = uracil
  modified_base 257..259: mod_base = OTHER; note = uracil
  modified_base 267: mod_base = OTHER; note = uracil
  modified_base 273: mod_base = OTHER; note = uracil
  modified_base 275: mod_base = OTHER; note = uracil
  modified_base 278..279: mod_base = OTHER; note = uracil
  modified_base 285: mod_base = OTHER; note = uracil
  modified_base 289: mod_base = OTHER; note = uracil
  modified_base 292: mod_base = OTHER; note = uracil
  modified_base 130: mod_base = m5c
  modified_base 132: mod_base = m5c
  modified_base 141: mod_base = m5c
  modified_base 207: mod_base = m5c
  modified_base 217: mod_base = m5c
  modified_base 246: mod_base = m5c
  variation 151: note = CpG site, residue is C if methylated or T(=U) if unmethylated
attttttttatttataaaggaggagatagagggttaaggttagtagttaagagtggttaggtaggggttatgatttagtgttgtgttttaaagtttttgtgttttttgttgtattattatttttatagtcgcggtttggtcggggagaggygatttttggtttgggataaagaggatttagatggtttttgagtagtttagattagcgtgggaggtcggtttggtgttttgattatatggtttagcggggttaaggtttagagaggttaaattatatttaaggttatatattaagagagta

SEQ ID NO: 103 - DNA, 300 bp, synthetic construct
  source 1..300: mol_type = other DNA
  modified_base 2..3: mod_base = OTHER; note = uracil
  modified_base 18..19: mod_base = OTHER; note = uracil
  modified_base 24: mod_base = OTHER; note = uracil
  modified_base 26..27: mod_base = OTHER; note = uracil
  modified_base 35..36: mod_base = OTHER; note = uracil
  modified_base 39..40: mod_base = OTHER; note = uracil
  modified_base 47: mod_base = OTHER; note = uracil
  modified_base 52: mod_base = OTHER; note = uracil
  modified_base 60: mod_base = OTHER; note = uracil
  modified_base 72: mod_base = OTHER; note = uracil
  modified_base 76: mod_base = OTHER; note = uracil
  modified_base 78: mod_base = OTHER; note = uracil
  modified_base 80: mod_base = OTHER; note = uracil
  modified_base 85: mod_base = OTHER; note = uracil
  modified_base 89..90: mod_base = OTHER; note = uracil
  modified_base 100: mod_base = OTHER; note = uracil
  modified_base 104: mod_base = OTHER; note = uracil
  modified_base 116: mod_base = OTHER; note = uracil
  modified_base 119: mod_base = OTHER; note = uracil
  modified_base 121: mod_base = OTHER; note = uracil
  modified_base 131: mod_base = OTHER; note = uracil
  modified_base 134: mod_base = OTHER; note = uracil
  modified_base 138: mod_base = OTHER; note = uracil
  modified_base 141..142: mod_base = OTHER; note = uracil
  modified_base 144..146: mod_base = OTHER; note = uracil
  modified_base 150: mod_base = OTHER; note = uracil
  modified_base 154: mod_base = OTHER; note = uracil
  modified_base 158: mod_base = OTHER; note = uracil
  modified_base 160: mod_base = OTHER; note = uracil
  modified_base 163..164: mod_base = OTHER; note = uracil
  modified_base 167..168: mod_base = OTHER; note = uracil
  modified_base 171..172: mod_base = OTHER; note = uracil
  modified_base 176..177: mod_base = OTHER; note = uracil
  modified_base 181: mod_base = OTHER; note = uracil
  modified_base 184..185: mod_base = OTHER; note = uracil
  modified_base 189: mod_base = OTHER; note = uracil
  modified_base 192: mod_base = OTHER; note = uracil
  modified_base 198: mod_base = OTHER; note = uracil
  modified_base 204: mod_base = OTHER; note = uracil
  modified_base 208: mod_base = OTHER; note = uracil
  modified_base 213..215: mod_base = OTHER; note = uracil
  modified_base 219: mod_base = OTHER; note = uracil
  modified_base 221..222: mod_base = OTHER; note = uracil
  modified_base 226: mod_base = OTHER; note = uracil
  modified_base 228: mod_base = OTHER; note = uracil
  modified_base 232: mod_base = OTHER; note = uracil
  modified_base 235..236: mod_base = OTHER; note = uracil
  modified_base 238..240: mod_base = OTHER; note = uracil
  modified_base 242..244: mod_base = OTHER; note = uracil
  modified_base 247: mod_base = OTHER; note = uracil
  modified_base 253: mod_base = OTHER; note = uracil
  modified_base 255: mod_base = OTHER; note = uracil
  modified_base 257: mod_base = OTHER; note = uracil
  modified_base 259..260: mod_base = OTHER; note = uracil
  modified_base 266..267: mod_base = OTHER; note = uracil
  modified_base 277: mod_base = OTHER; note = uracil
  modified_base 279: mod_base = OTHER; note = uracil
  modified_base 282..284: mod_base = OTHER; note = uracil
  modified_base 289..290: mod_base = OTHER; note = uracil
  modified_base 294: mod_base = OTHER; note = uracil
  modified_base 297..299: mod_base = OTHER; note = uracil
  modified_base 113: mod_base = m5c
  modified_base 126: mod_base = m5c
  modified_base 135: mod_base = m5c
  modified_base 230: mod_base = m5c
  modified_base 245: mod_base = m5c
  modified_base 248: mod_base = m5c
  modified_base 261: mod_base = m5c
  modified_base 287: mod_base = m5c
  variation 148: note = CpG site, residue is C if methylated or T(=U) if unmethylated
  variation 152: note = CpG site, residue is C if methylated or T(=U) if unmethylated
gttatggagaaaatatgttatgtttttatggaaattaatttatttgtttaattgaggttttgggggtggttttgatatttagtgttaattagggggagtttggttgtgaggtcgttagtatatggcggtgttgtcggttgttttttaygtaygtaggttttgttagtttgttttgttaatttgttaggtaattgggataggtgtagatatgatttaggttttaagtatacgtatttatttttttcgtcgaggtattttttcggtgttatatgttgattttgtttagcgttaggtagttta

SEQ ID NO: 104 - DNA, 300 bp, synthetic construct
  source 1..300: mol_type = other DNA
  modified_base 5: mod_base = OTHER; note = uracil
  modified_base 8..9: mod_base = OTHER; note = uracil
  modified_base 15: mod_base = OTHER; note = uracil
  modified_base 20: mod_base = OTHER; note = uracil
  modified_base 26: mod_base = OTHER; note = uracil
  modified_base 29: mod_base = OTHER; note = uracil
  modified_base 36: mod_base = OTHER; note = uracil
  modified_base 38: mod_base = OTHER; note = uracil
  modified_base 49..50: mod_base = OTHER; note = uracil
  modified_base 76: mod_base = OTHER; note = uracil
  modified_base 83..84: mod_base = OTHER; note = uracil
  modified_base 90: mod_base = OTHER; note = uracil
  modified_base 95: mod_base = OTHER; note = uracil
  modified_base 98: mod_base = OTHER; note = uracil
  modified_base 100..101: mod_base = OTHER; note = uracil
  modified_base 105..107: mod_base = OTHER; note = uracil
  modified_base 113..114: mod_base = OTHER; note = uracil
  modified_base 118: mod_base = OTHER; note = uracil
  modified_base 126: mod_base = OTHER; note = uracil
  modified_base 131: mod_base = OTHER; note = uracil
  modified_base 135: mod_base = OTHER; note = uracil
  modified_base 139: mod_base = OTHER; note = uracil
  modified_base 144..145: mod_base = OTHER; note = uracil
  modified_base 161: mod_base = OTHER; note = uracil
  modified_base 164: mod_base = OTHER; note = uracil
  modified_base 168: mod_base = OTHER; note = uracil
  modified_base 171: mod_base = OTHER; note = uracil
  modified_base 173: mod_base = OTHER; note = uracil
  modified_base 176..177: mod_base = OTHER; note = uracil
  modified_base 183: mod_base = OTHER; note = uracil
  modified_base 190..191: mod_base = OTHER; note = uracil
  modified_base 193: mod_base = OTHER; note = uracil
  modified_base 195: mod_base = OTHER; note = uracil
  modified_base 198..199: mod_base = OTHER; note = uracil
  modified_base 203: mod_base = OTHER; note = uracil
  modified_base 205..209: mod_base = OTHER; note = uracil
  modified_base 217: mod_base = OTHER; note = uracil
  modified_base 219: mod_base = OTHER; note = uracil
  modified_base 227: mod_base = OTHER; note = uracil
  modified_base 232..233: mod_base = OTHER; note = uracil
  modified_base 235..239: mod_base = OTHER; note = uracil
  modified_base 244..245: mod_base = OTHER; note = uracil
  modified_base 247: mod_base = OTHER; note = uracil
  modified_base 255: mod_base = OTHER; note = uracil
  modified_base 270..271: mod_base = OTHER; note = uracil
  modified_base 279: mod_base = OTHER; note = uracil
  modified_base 284: mod_base = OTHER; note = uracil
  modified_base 292: mod_base = OTHER; note = uracil
  modified_base 294..295: mod_base = OTHER; note = uracil
  modified_base 300: mod_base = OTHER; note = uracil
  modified_base 13: mod_base = m5c
  modified_base 39: mod_base = m5c
  modified_base 52: mod_base = m5c
  modified_base 55: mod_base = m5c
  modified_base 70: mod_base = m5c
  modified_base 165: mod_base = m5c
  modified_base 174: mod_base = m5c
  modified_base 187: mod_base = m5c
  variation 148: note = CpG site, residue is C if methylated or T(=U) if unmethylated
  variation 152: note = CpG site, residue is C if methylated or T(=U) if unmethylated
tgggttgtttggcgttgggtagagttaatatatggtatcgggagagtgtttcggcggggagggtggatgcgtgtgtttggagtttgggttatgtttgtatttgttttagttgtttggtagattggtaaggtaggttggtagagtttgygtgygtgggaggtagtcggtagtatcgttatgtgttgacgattttatagttagattttttttggttagtattgagtgttagaattatttttagaattttagttaagtaaataggttggtttttatggagatatggtatattttttttatggt

SEQ ID NO: 105 - DNA, 300 bp, synthetic construct
  source 1..300: mol_type = other DNA
  modified_base 5: mod_base = OTHER; note = uracil
  modified_base 9: mod_base = OTHER; note = uracil
  modified_base 21: mod_base = OTHER; note = uracil
  modified_base 24: mod_base = OTHER; note = uracil
  modified_base 26: mod_base = OTHER; note = uracil
  modified_base 36: mod_base = OTHER; note = uracil
  modified_base 39: mod_base = OTHER; note = uracil
  modified_base 43: mod_base = OTHER; note = uracil
  modified_base 46..47: mod_base = OTHER; note = uracil
  modified_base 49..51: mod_base = OTHER; note = uracil
  modified_base 55: mod_base = OTHER; note = uracil
  modified_base 59: mod_base = OTHER; note = uracil
  modified_base 63: mod_base = OTHER; note = uracil
  modified_base 65: mod_base = OTHER; note = uracil
  modified_base 68..69: mod_base = OTHER; note = uracil
  modified_base 72..73: mod_base = OTHER; note = uracil
  modified_base 76..77: mod_base = OTHER; note = uracil
  modified_base 81..82: mod_base = OTHER; note = uracil
  modified_base 86: mod_base = OTHER; note = uracil
  modified_base 89..90: mod_base = OTHER; note = uracil
  modified_base 94: mod_base = OTHER; note = uracil
  modified_base 97: mod_base = OTHER; note = uracil
  modified_base 103: mod_base = OTHER; note = uracil
  modified_base 109: mod_base = OTHER; note = uracil
  modified_base 113: mod_base = OTHER; note = uracil
  modified_base 118..120: mod_base = OTHER; note = uracil
  modified_base 124: mod_base = OTHER; note = uracil
  modified_base 126..127: mod_base = OTHER; note = uracil
  modified_base 131: mod_base = OTHER; note = uracil
  modified_base 133: mod_base = OTHER; note = uracil
  modified_base 137: mod_base = OTHER; note = uracil
  modified_base 140..141: mod_base = OTHER; note = uracil
  modified_base 143..145: mod_base = OTHER; note = uracil
  modified_base 147..149: mod_base = OTHER; note = uracil
  modified_base 152: mod_base = OTHER; note = uracil
  modified_base 158: mod_base = OTHER; note = uracil
  modified_base 160: mod_base = OTHER; note = uracil
  modified_base 162: mod_base = OTHER; note = uracil
  modified_base 164..165: mod_base = OTHER; note = uracil
  modified_base 171..172: mod_base = OTHER; note = uracil
  modified_base 182: mod_base = OTHER; note = uracil
  modified_base 184: mod_base = OTHER; note = uracil
  modified_base 187..189: mod_base = OTHER; note = uracil
  modified_base 194..195: mod_base = OTHER; note = uracil
  modified_base 199: mod_base = OTHER; note = uracil
  modified_base 202..204: mod_base = OTHER; note = uracil
  modified_base 209..211: mod_base = OTHER; note = uracil
  modified_base 213..214: mod_base = OTHER; note = uracil
  modified_base 216..220: mod_base = OTHER; note = uracil
  modified_base 222..225: mod_base = OTHER; note = uracil
  modified_base 228..229: mod_base = OTHER; note = uracil
  modified_base 233..236: mod_base = OTHER; note = uracil
  modified_base 240: mod_base = OTHER; note = uracil
  modified_base 242: mod_base = OTHER; note = uracil
  modified_base 247: mod_base = OTHER; note = uracil
  modified_base 249: mod_base = OTHER; note = uracil
  modified_base 253..254: mod_base = OTHER; note = uracil
  modified_base 256: mod_base = OTHER; note = uracil
  modified_base 259: mod_base = OTHER; note = uracil
  modified_base 279: mod_base = OTHER; note = uracil
  modified_base 283: mod_base = OTHER; note = uracil
  modified_base 286: mod_base = OTHER; note = uracil
  modified_base 290: mod_base = OTHER; note = uracil
  modified_base 292..294: mod_base = OTHER; note = uracil
  modified_base 18: mod_base = m5c
  modified_base 31: mod_base = m5c
  modified_base 40: mod_base = m5c
  modified_base 53: mod_base = m5c
  modified_base 57: mod_base = m5c
  modified_base 135: mod_base = m5c
  modified_base 153: mod_base = m5c
  modified_base 166: mod_base = m5c
  modified_base 192: mod_base = m5c
  modified_base 207: mod_base = m5c
  modified_base 238: mod_base = m5c
  variation 150: note = CpG site, residue is C if methylated or T(=U) if unmethylated
gagtttggttgtgaggtcgttagtatatggcggtgttgtcggttgttttttacgtacgtaggttttgttagtttgttttgttaatttgttaggtaattgggataggtgtagatatgatttaggttttaagtatacgtatttatttttttygtcgaggtattttttcggtgttatatgttgattttgtttagcgttaggtagtttagcgtttatttttttttttttagtttggttttacgtatagtgttttagtttttgttgggtagtgtgaggagtggtaatttgtaggtattttagaag

SEQ ID NO: 106 - DNA, 300 bp, synthetic construct
  source 1..300: mol_type = other DNA
  modified_base 1: mod_base = OTHER; note = uracil
  modified_base 4: mod_base = OTHER; note = uracil
  modified_base 12..13: mod_base = OTHER; note = uracil
  modified_base 16: mod_base = OTHER; note = uracil
  modified_base 23..24: mod_base = OTHER; note = uracil
  modified_base 26: mod_base = OTHER; note = uracil
  modified_base 28..29: mod_base = OTHER; note = uracil
  modified_base 31: mod_base = OTHER; note = uracil
  modified_base 33: mod_base = OTHER; note = uracil
  modified_base 35: mod_base = OTHER; note = uracil
  modified_base 38..40: mod_base = OTHER; note = uracil
  modified_base 43: mod_base = OTHER; note = uracil
  modified_base 49: mod_base = OTHER; note = uracil
  modified_base 55: mod_base = OTHER; note = uracil
  modified_base 57: mod_base = OTHER; note = uracil
  modified_base 69..70: mod_base = OTHER; note = uracil
  modified_base 74: mod_base = OTHER; note = uracil
  modified_base 95: mod_base = OTHER; note = uracil
  modified_base 100: mod_base = OTHER; note = uracil
  modified_base 103..104: mod_base = OTHER; note = uracil
  modified_base 110: mod_base = OTHER; note = uracil
  modified_base 115: mod_base = OTHER; note = uracil
  modified_base 121: mod_base = OTHER; note = uracil
  modified_base 124: mod_base = OTHER; note = uracil
  modified_base 131: mod_base = OTHER; note = uracil
  modified_base 133: mod_base = OTHER; note = uracil
  modified_base 144..145: mod_base = OTHER; note = uracil
  modified_base 171: mod_base = OTHER; note = uracil
  modified_base 178..179: mod_base = OTHER; note = uracil
  modified_base 185: mod_base = OTHER; note = uracil
  modified_base 190: mod_base = OTHER; note = uracil
  modified_base 193: mod_base = OTHER; note = uracil
  modified_base 195..196: mod_base = OTHER; note = uracil
  modified_base 200..202: mod_base = OTHER; note = uracil
  modified_base 208..209: mod_base = OTHER; note = uracil
  modified_base 213: mod_base = OTHER; note = uracil
  modified_base 221: mod_base = OTHER; note = uracil
  modified_base 226: mod_base = OTHER; note = uracil
  modified_base 230: mod_base = OTHER; note = uracil
  modified_base 234: mod_base = OTHER; note = uracil
  modified_base 239..240: mod_base = OTHER; note = uracil
  modified_base 256: mod_base = OTHER; note = uracil
  modified_base 259: mod_base = OTHER; note = uracil
  modified_base 263: mod_base = OTHER; note = uracil
  modified_base 266: mod_base = OTHER; note = uracil
  modified_base 268: mod_base = OTHER; note = uracil
  modified_base 271..272: mod_base = OTHER; note = uracil
  modified_base 278: mod_base = OTHER; note = uracil
  modified_base 285..286: mod_base = OTHER; note = uracil
  modified_base 288: mod_base = OTHER; note = uracil
  modified_base 290: mod_base = OTHER; note = uracil
  modified_base 293..294: mod_base = OTHER; note = uracil
  modified_base 298: mod_base = OTHER; note = uracil
  modified_base 300: mod_base = OTHER; note = uracil
  modified_base 62: mod_base = m5c
  modified_base 93: mod_base = m5c
  modified_base 108: mod_base = m5c
  modified_base 134: mod_base = m5c
  modified_base 147: mod_base = m5c
  modified_base 165: mod_base = m5c
  modified_base 243: mod_base = m5c
  modified_base 247: mod_base = m5c
  modified_base 260: mod_base = m5c
  modified_base 269: mod_base = m5c
  modified_base 282: mod_base = m5c
  variation 150: note = CpG site, residue is C if methylated or T(=U) if unmethylated
tttttagggtgtttgtagattgttattttttatattatttagtagaggttagagtattgtgcgtggggttaggttggggagggggaggtgggcgttgggttgtttggcgttgggtagagttaatatatggtatcgggagagtgtttcggyggggagggtggatgcgtgtgtttggagtttgggttatgtttgtatttgttttagttgtttggtagattggtaaggtaggttggtagagtttgcgtgcgtgggaggtagtcggtagtatcgttatgtgttgacgattttatagttagattt

SEQ ID NO: 107 - DNA, 300 bp, synthetic construct
  source 1..300: mol_type = other DNA
  modified_base 2: mod_base = OTHER; note = uracil
  modified_base 8..9: mod_base = OTHER; note = uracil
  modified_base 16: mod_base = OTHER; note = uracil
  modified_base 21: mod_base = OTHER; note = uracil
  modified_base 23..26: mod_base = OTHER; note = uracil
  modified_base 28..30: mod_base = OTHER; note = uracil
  modified_base 32: mod_base = OTHER; note = uracil
  modified_base 35: mod_base = OTHER; note = uracil
  modified_base 38: mod_base = OTHER; note = uracil
  modified_base 40: mod_base = OTHER; note = uracil
  modified_base 43: mod_base = OTHER; note = uracil
  modified_base 45..46: mod_base = OTHER; note = uracil
  modified_base 49..50: mod_base = OTHER; note = uracil
  modified_base 60..61: mod_base = OTHER; note = uracil
  modified_base 64..66: mod_base = OTHER; note = uracil
  modified_base 76..80: mod_base = OTHER; note = uracil
  modified_base 84..86: mod_base = OTHER; note = uracil
  modified_base 90..91: mod_base = OTHER; note = uracil
  modified_base 93: mod_base = OTHER; note = uracil
  modified_base 95..96: mod_base = OTHER; note = uracil
  modified_base 101..102: mod_base = OTHER; note = uracil
  modified_base 116: mod_base = OTHER; note = uracil
  modified_base 122: mod_base = OTHER; note = uracil
  modified_base 128: mod_base = OTHER; note = uracil
  modified_base 135..137: mod_base = OTHER; note = uracil
  modified_base 140: mod_base = OTHER; note = uracil
  modified_base 144..146: mod_base = OTHER; note = uracil
  modified_base 157: mod_base = OTHER; note = uracil
  modified_base 160..161: mod_base = OTHER; note = uracil
  modified_base 169: mod_base = OTHER; note = uracil
  modified_base 172..173: mod_base = OTHER; note = uracil
  modified_base 181..182: mod_base = OTHER; note = uracil
  modified_base 185: mod_base = OTHER; note = uracil
  modified_base 188..190: mod_base = OTHER; note = uracil
  modified_base 192..193: mod_base = OTHER; note = uracil
  modified_base 199..200: mod_base = OTHER; note = uracil
  modified_base 202..203: mod_base = OTHER; note = uracil
  modified_base 206: mod_base = OTHER; note = uracil
  modified_base 210: mod_base = OTHER; note = uracil
  modified_base 214: mod_base = OTHER; note = uracil
  modified_base 218..221: mod_base = OTHER; note = uracil
  modified_base 226: mod_base = OTHER; note = uracil
  modified_base 230..232: mod_base = OTHER; note = uracil
  modified_base 234: mod_base = OTHER; note = uracil
  modified_base 238: mod_base = OTHER; note = uracil
  modified_base 240: mod_base = OTHER; note = uracil
  modified_base 244..245: mod_base = OTHER; note = uracil
  modified_base 249..250: mod_base = OTHER; note = uracil
  modified_base 274: mod_base = OTHER; note = uracil
  modified_base 282: mod_base = OTHER; note = uracil
  modified_base 289..291: mod_base = OTHER; note = uracil
  modified_base 294: mod_base = OTHER; note = uracil
  modified_base 298..300: mod_base = OTHER; note = uracil
  modified_base 3: mod_base = m5c
  modified_base 10: mod_base = m5c
  modified_base 17: mod_base = m5c
  modified_base 36: mod_base = m5c
  modified_base 51: mod_base = m5c
  modified_base 68: mod_base = m5c
  modified_base 72: mod_base = m5c
  modified_base 129: mod_base = m5c
  modified_base 147: mod_base = m5c
  modified_base 178: mod_base = m5c
  modified_base 194: mod_base = m5c
  modified_base 196: mod_base = m5c
  modified_base 204: mod_base = m5c
  modified_base 215: mod_base = m5c
  modified_base 255: mod_base = m5c
  modified_base 283: mod_base = m5c
  modified_base 292: mod_base = m5c
  variation 151: note = CpG site, residue is C if methylated or T(=U) if unmethylated
gtcgaatttcgagggtcgagtattttttttttagtcgtattgtatttgttcgtaggtgattaatttacgggcggatttttagatttaattttttttagagttagggtgggatgggtagggataggagtcggaggttttattggtttcgggygaaggtattttggaaagtatttagagcgtttagtatttttttcgcggttattcgtaggttgatcgatttttgggtagatttttagatttaatttagtttagggcggattaaggagtgggagataagggagtcggtggtttcgttggttt

SEQ ID NO: 108 - DNA, 300 bp, synthetic construct
  source 1..300: mol_type = other DNA
  modified_base 4..5: mod_base = OTHER; note = uracil
  modified_base 13..14: mod_base = OTHER; note = uracil
  modified_base 16: mod_base = OTHER; note = uracil
  modified_base 20: mod_base = OTHER; note = uracil
  modified_base 22..24: mod_base = OTHER; note = uracil
  modified_base 29: mod_base = OTHER; note = uracil
  modified_base 31..33: mod_base = OTHER; note = uracil
  modified_base 35: mod_base = OTHER; note = uracil
  modified_base 37..38: mod_base = OTHER; note = uracil
  modified_base 44: mod_base = OTHER; note = uracil
  modified_base 47..49: mod_base = OTHER; note = uracil
  modified_base 54: mod_base = OTHER; note = uracil
  modified_base 65: mod_base = OTHER; note = uracil
  modified_base 73: mod_base = OTHER; note = uracil
  modified_base 76..78: mod_base = OTHER; note = uracil
  modified_base 89: mod_base = OTHER; note = uracil
  modified_base 92..93: mod_base = OTHER; note = uracil
  modified_base 103: mod_base = OTHER; note = uracil
  modified_base 117: mod_base = OTHER; note = uracil
  modified_base 124: mod_base = OTHER; note = uracil
  modified_base 126: mod_base = OTHER; note = uracil
  modified_base 133: mod_base = OTHER; note = uracil
  modified_base 137..138: mod_base = OTHER; note = uracil
  modified_base 145..146: mod_base = OTHER; note = uracil
  modified_base 151..152: mod_base = OTHER; note = uracil
  modified_base 158..159: mod_base = OTHER; note = uracil
  modified_base 167..168: mod_base = OTHER; note = uracil
  modified_base 170: mod_base = OTHER; note = uracil
  modified_base 174: mod_base = OTHER; note = uracil
  modified_base 176..177: mod_base = OTHER; note = uracil
  modified_base 181..183: mod_base = OTHER; note = uracil
  modified_base 186..188: mod_base = OTHER; note = uracil
  modified_base 191..193: mod_base = OTHER; note = uracil
  modified_base 195..197: mod_base = OTHER; note = uracil
  modified_base 201: mod_base = OTHER; note = uracil
  modified_base 203: mod_base = OTHER; note = uracil
  modified_base 219: mod_base = OTHER; note = uracil
  modified_base 227: mod_base = OTHER; note = uracil
  modified_base 230..231: mod_base = OTHER; note = uracil
  modified_base 243: mod_base = OTHER; note = uracil
  modified_base 245..246: mod_base = OTHER; note = uracil
  modified_base 253: mod_base = OTHER; note = uracil
  modified_base 259: mod_base = OTHER; note = uracil
  modified_base 267: mod_base = OTHER; note = uracil
  modified_base 281: mod_base = OTHER; note = uracil
  modified_base 286..288: mod_base = OTHER; note = uracil
  modified_base 300: mod_base = OTHER; note = uracil
  modified_base 8: mod_base = m5c
  modified_base 17: mod_base = m5c
  modified_base 45: mod_base = m5c
  modified_base 85: mod_base = m5c
  modified_base 96: mod_base = m5c
  modified_base 104: mod_base = m5c
  modified_base 106: mod_base = m5c
  modified_base 122: mod_base = m5c
  modified_base 153: mod_base = m5c
  modified_base 171: mod_base = m5c
  modified_base 228: mod_base = m5c
  modified_base 232: mod_base = m5c
  modified_base 249: mod_base = m5c
  modified_base 264: mod_base = m5c
  modified_base 283: mod_base = m5c
  modified_base 290: mod_base = m5c
  modified_base 297: mod_base = m5c
  variation 149: note = CpG site, residue is C if methylated or T(=U) if unmethylated
gggttagcggggttatcggtttttttgttttttattttttaattcgttttggattggattgagtttgagggtttgtttaggggtcggttagtttgcgggtggtcgcgggagggatgttggacgttttggatgttttttaggatgttttygttcggggttagtagggttttcggtttttgtttttgtttattttattttggttttggagaggattgggtttgggggttcgttcgtgggttggttatttacgggtaggtgtagtgcggttgagggaggggtgttcggttttcgggattcggt

SEQ ID NO: 109 - DNA, 300 bp, synthetic construct
  source 1..300: mol_type = other DNA
  modified_base 4: mod_base = OTHER; note = uracil
  modified_base 9..10: mod_base = OTHER; note = uracil
  modified_base 20: mod_base = OTHER; note = uracil
  modified_base 23: mod_base = OTHER; note = uracil
  modified_base 27: mod_base = OTHER; note = uracil
  modified_base 32: mod_base = OTHER; note = uracil
  modified_base 40..41: mod_base = OTHER; note = uracil
  modified_base 47: mod_base = OTHER; note = uracil
  modified_base 53: mod_base = OTHER; note = uracil
  modified_base 55: mod_base = OTHER; note = uracil
  modified_base 66..67: mod_base = OTHER; note = uracil
  modified_base 84: mod_base = OTHER; note = uracil
  modified_base 90: mod_base = OTHER; note = uracil
  modified_base 100: mod_base = OTHER; note = uracil
  modified_base 104..105: mod_base = OTHER; note = uracil
  modified_base 107..108: mod_base = OTHER; note = uracil
  modified_base 115: mod_base = OTHER; note = uracil
  modified_base 124: mod_base = OTHER; note = uracil
  modified_base 128: mod_base = OTHER; note = uracil
  modified_base 130: mod_base = OTHER; note = uracil
  modified_base 134..135: mod_base = OTHER; note = uracil
  modified_base 142..144: mod_base = OTHER; note = uracil
  modified_base 147: mod_base = OTHER; note = uracil
  modified_base 149: mod_base = OTHER; note = uracil
  modified_base 159: mod_base = OTHER; note = uracil
  modified_base 164: mod_base = OTHER; note = uracil
  modified_base 169: mod_base = OTHER; note = uracil
  modified_base 174: mod_base = OTHER; note = uracil
  modified_base 176: mod_base = OTHER; note = uracil
  modified_base 182: mod_base = OTHER; note = uracil
  modified_base 195..196: mod_base = OTHER; note = uracil
  modified_base 199..200: mod_base = OTHER; note = uracil
  modified_base 204: mod_base = OTHER; note = uracil
  modified_base 208: mod_base = OTHER; note = uracil
  modified_base 218..220: mod_base = OTHER; note = uracil
  modified_base 224: mod_base = OTHER; note = uracil
  modified_base 226: mod_base = OTHER; note = uracil
  modified_base 229: mod_base = OTHER; note = uracil
  modified_base 238: mod_base = OTHER; note = uracil
  modified_base 250: mod_base = OTHER; note = uracil
  modified_base 255: mod_base = OTHER; note = uracil
  modified_base 259: mod_base = OTHER; note = uracil
  modified_base 269..270: mod_base = OTHER; note = uracil
  modified_base 277..279: mod_base = OTHER; note = uracil
  modified_base 282: mod_base = OTHER; note = uracil
  modified_base 285: mod_base = OTHER; note = uracil
  modified_base 294: mod_base = OTHER; note = uracil
  modified_base 300: mod_base = OTHER; note = uracil
  modified_base 60: mod_base = m5c
  modified_base 86: mod_base = m5c
  modified_base 116: mod_base = m5c
  modified_base 165: mod_base = m5c
  modified_base 190: mod_base = m5c
  modified_base 221: mod_base = m5c
  modified_base 251: mod_base = m5c
  modified_base 263: mod_base = m5c
  modified_base 267: mod_base = m5c
  modified_base 287: mod_base = m5c
  variation 132: note = CpG site, residue is C if methylated or T(=U) if unmethylated
  variation 160: note = CpG site, residue is C if methylated or T(=U) if unmethylated
  variation 170: note = CpG site, residue is C if methylated or T(=U) if unmethylated
ttgtttgattaaaagaatgtagtagatataattttgagatttggagttaggttataagacgattttttgggttttgtggaattttcgttttgaaagaaataagttattaagtggtcgggtgagttggtttaygtttgtaattttagtattttgggaggtygagtcgggtygattataaggttaggagatcgagattattttggttaatatggtgaaatttcgtttttattaaaaatataaaaaaattagtcgggtatattggcgggcgtttgtagttttagttattcgggaggttgaggt

SEQ ID NO: 110 - DNA, 300 bp, synthetic construct
  source 1..300: mol_type = other DNA
  modified_base 2..3: mod_base = OTHER; note = uracil
  modified_base 5: mod_base = OTHER; note = uracil
  modified_base 8..9: mod_base = OTHER; note = uracil
  modified_base 11..12: mod_base = OTHER; note = uracil
  modified_base 20: mod_base = OTHER; note = uracil
  modified_base 26: mod_base = OTHER; note = uracil
  modified_base 29: mod_base = OTHER; note = uracil
  modified_base 35..36: mod_base = OTHER; note = uracil
  modified_base 39..40: mod_base = OTHER; note = uracil
  modified_base 47..48: mod_base = OTHER; note = uracil
  modified_base 52: mod_base = OTHER; note = uracil
  modified_base 87: mod_base = OTHER; note = uracil
  modified_base 89..90: mod_base = OTHER; note = uracil
  modified_base 98..99: mod_base = OTHER; note = uracil
  modified_base 108: mod_base = OTHER; note = uracil
  modified_base 114: mod_base = OTHER; note = uracil
  modified_base 116..117: mod_base = OTHER; note = uracil
  modified_base 121..122: mod_base = OTHER; note = uracil
  modified_base 133..134: mod_base = OTHER; note = uracil
  modified_base 138: mod_base = OTHER; note = uracil
  modified_base 143..144: mod_base = OTHER; note = uracil
  modified_base 146..148: mod_base = OTHER; note = uracil
  modified_base 155: mod_base = OTHER; note = uracil
  modified_base 164: mod_base = OTHER; note = uracil
  modified_base 174..175: mod_base = OTHER; note = uracil
  modified_base 178: mod_base = OTHER; note = uracil
  modified_base 180: mod_base = OTHER; note = uracil
  modified_base 182..183: mod_base = OTHER; note = uracil
  modified_base 187..188: mod_base = OTHER; note = uracil
  modified_base 190: mod_base = OTHER; note = uracil
  modified_base 198: mod_base = OTHER; note = uracil
  modified_base 205: mod_base = OTHER; note = uracil
  modified_base 209: mod_base = OTHER; note = uracil
  modified_base 222..223: mod_base = OTHER; note = uracil
  modified_base 225: mod_base = OTHER; note = uracil
  modified_base 230..232: mod_base = OTHER; note = uracil
  modified_base 243: mod_base = OTHER; note = uracil
  modified_base 250..251: mod_base = OTHER; note = uracil
  modified_base 255: mod_base = OTHER; note = uracil
  modified_base 257..258: mod_base = OTHER; note = uracil
  modified_base 263: mod_base = OTHER; note = uracil
  modified_base 265: mod_base = OTHER; note = uracil
  modified_base 276: mod_base = OTHER; note = uracil
  modified_base 279: mod_base = OTHER; note = uracil
  modified_base 282: mod_base = OTHER; note = uracil
  modified_base 286: mod_base = OTHER; note = uracil
  modified_base 294: mod_base = OTHER; note = uracil
  modified_base 298: mod_base = OTHER; note = uracil
  modified_base 13: mod_base = m5c
  modified_base 33: mod_base = m5c
  modified_base 37: mod_base = m5c
  modified_base 49: mod_base = m5c
  modified_base 79: mod_base = m5c
  modified_base 110: mod_base = m5c
  modified_base 135: mod_base = m5c
  modified_base 184: mod_base = m5c
  modified_base 214: mod_base = m5c
  modified_base 240: mod_base = m5c
  variation 130: note = CpG site, residue is C if methylated or T(=U) if unmethylated
  variation 140: note = CpG site, residue is C if methylated or T(=U) if unmethylated
  variation 168: note = CpG site, residue is C if methylated or T(=U) if unmethylated
gttttagtttttcgagtagttgggattataggcgttcgttagtatgttcggttaatttttttgtatttttagtagagacggggttttattatgttagttaggatggtttcgattttttgattttgtgatyggttcggttyggttttttaaagtgttgggattataggygtgagttagtttattcggttatttggtggtttgttttttttagaacgagaattttataaaatttaggaaatcgttttgtgatttagttttaggttttaaagttatgtttgttgtatttttttggttaagtaa

SEQ ID NO: 111 - DNA, 300 bp, synthetic construct
  source 1..300: mol_type = other DNA
  modified_base 6: mod_base = OTHER; note = uracil
  modified_base 9..10: mod_base = OTHER; note = uracil
  modified_base 14: mod_base = OTHER; note = uracil
  modified_base 21: mod_base = OTHER; note = uracil
  modified_base 23: mod_base = OTHER; note = uracil
  modified_base 25..28: mod_base = OTHER; note = uracil
  modified_base 31: mod_base = OTHER; note = uracil
  modified_base 33..37: mod_base = OTHER; note = uracil
  modified_base 39: mod_base = OTHER; note = uracil
  modified_base 44: mod_base = OTHER; note = uracil
  modified_base 46: mod_base = OTHER; note = uracil
  modified_base 50: mod_base = OTHER; note = uracil
  modified_base 63..65: mod_base = OTHER; note = uracil
  modified_base 78: mod_base = OTHER; note = uracil
  modified_base 81: mod_base = OTHER; note = uracil
  modified_base 84: mod_base = OTHER; note = uracil
  modified_base 88: mod_base = OTHER; note = uracil
  modified_base 90..91: mod_base = OTHER; note = uracil
  modified_base 97..98: mod_base = OTHER; note = uracil
  modified_base 101: mod_base = OTHER; note = uracil
  modified_base 103..105: mod_base = OTHER; note = uracil
  modified_base 108: mod_base = OTHER; note = uracil
  modified_base 110: mod_base = OTHER; note = uracil
  modified_base 113: mod_base = OTHER; note = uracil
  modified_base 119: mod_base = OTHER; note = uracil
  modified_base 121..124: mod_base = OTHER; note = uracil
  modified_base 130: mod_base = OTHER; note = uracil
  modified_base 134..138: mod_base = OTHER; note = uracil
  modified_base 140..141: mod_base = OTHER; note = uracil
  modified_base 147: mod_base = OTHER; note = uracil
  modified_base 149: mod_base = OTHER; note = uracil
  modified_base 155..156: mod_base = OTHER; note = uracil
  modified_base 169: mod_base = OTHER; note = uracil
  modified_base 171: mod_base = OTHER; note = uracil
  modified_base 182: mod_base = OTHER; note = uracil
  modified_base 184..185: mod_base = OTHER; note = uracil
  modified_base 191: mod_base = OTHER; note = uracil
  modified_base 202: mod_base = OTHER; note = uracil
  modified_base 205: mod_base = OTHER; note = uracil
  modified_base 210: mod_base = OTHER; note = uracil
  modified_base 212: mod_base = OTHER; note = uracil
  modified_base 235..236: mod_base = OTHER; note = uracil
  modified_base 239..240: mod_base = OTHER; note = uracil
  modified_base 246: mod_base = OTHER; note = uracil
  modified_base 253: mod_base = OTHER; note = uracil
  modified_base 256: mod_base = OTHER; note = uracil
  modified_base 262: mod_base = OTHER; note = uracil
  modified_base 264: mod_base = OTHER; note = uracil
  modified_base 271: mod_base = OTHER; note = uracil
  modified_base 276: mod_base = OTHER; note = uracil
  modified_base 278..279: mod_base = OTHER; note = uracil
  modified_base 285..286: mod_base = OTHER; note = uracil
  modified_base 288: mod_base = OTHER; note = uracil
  modified_base 292: mod_base = OTHER; note = uracil
  modified_base 296: mod_base = OTHER; note = uracil
  modified_base 18: mod_base = m5c
  modified_base 40: mod_base = m5c
  modified_base 51: mod_base = m5c
  modified_base 68: mod_base = m5c
  modified_base 116: mod_base = m5c
  modified_base 131: mod_base = m5c
  modified_base 142: mod_base = m5c
  modified_base 158: mod_base = m5c
  modified_base 173: mod_base = m5c
  modified_base 192: mod_base = m5c
  modified_base 215: mod_base = m5c
  modified_base 217: mod_base = m5c
  modified_base 224: mod_base = m5c
  modified_base 228: mod_base = m5c
  modified_base 251: mod_base = m5c
  modified_base 268: mod_base = m5c
  modified_base 274: mod_base = m5c
  modified_base 293: mod_base = m5c
  modified_base 299: mod_base = m5c
  variation 151: note = CpG site, residue is C if methylated or T(=U) if unmethylated
agaatttgtttagtaggcggtttttttttgtttttttatcgagtatagatcgtgggaggggattttgcgggaggaggttgttttagtttttagagattattttttatttttatagcgatttttttatgatcgttttttattcggtgttttygggttacggggaagggatattcgggaaagatattagagatcgggagggtgtagttgggtttttcgcggggagcgggcgggaggtttttttgttatatgtcgtagttgggatatagacggtagcgttttagggtttatttgtcggtttcg

SEQ ID NO: 112 - DNA, 300 bp, synthetic construct
  source 1..300: mol_type = other DNA
  modified_base 6: mod_base = OTHER; note = uracil
  modified_base 10: mod_base = OTHER; note = uracil
  modified_base 18..20: mod_base = OTHER; note = uracil
  modified_base 28: mod_base = OTHER; note = uracil
  modified_base 31: mod_base = OTHER; note = uracil
  modified_base 35: mod_base = OTHER; note = uracil
  modified_base 41..43: mod_base = OTHER; note = uracil
  modified_base 46: mod_base = OTHER; note = uracil
  modified_base 52: mod_base = OTHER; note = uracil
  modified_base 59: mod_base = OTHER; note = uracil
  modified_base 67..68: mod_base = OTHER; note = uracil
  modified_base 70..71: mod_base = OTHER; note = uracil
  modified_base 74..75: mod_base = OTHER; note = uracil
  modified_base 78: mod_base = OTHER; note = uracil
  modified_base 80..82: mod_base = OTHER; note = uracil
  modified_base 92..94: mod_base = OTHER; note = uracil
  modified_base 97: mod_base = OTHER; note = uracil
  modified_base 100: mod_base = OTHER; note = uracil
  modified_base 102..104: mod_base = OTHER; note = uracil
  modified_base 106..107: mod_base = OTHER; note = uracil
  modified_base 112: mod_base = OTHER; note = uracil
  modified_base 114: mod_base = OTHER; note = uracil
  modified_base 121: mod_base = OTHER; note = uracil
  modified_base 125..126: mod_base = OTHER; note = uracil
  modified_base 134..136: mod_base = OTHER; note = uracil
  modified_base 139..141: mod_base = OTHER; note = uracil
  modified_base 147..148: mod_base = OTHER; note = uracil
  modified_base 155: mod_base = OTHER; note = uracil
  modified_base 157: mod_base = OTHER; note = uracil
  modified_base 173: mod_base = OTHER; note = uracil
  modified_base 186: mod_base = OTHER; note = uracil
  modified_base 206: mod_base = OTHER; note = uracil
  modified_base 208: mod_base = OTHER; note = uracil
  modified_base 215: mod_base = OTHER; note = uracil
  modified_base 221: mod_base = OTHER; note = uracil
  modified_base 224..225: mod_base = OTHER; note = uracil
  modified_base 227..228: mod_base = OTHER; note = uracil
  modified_base 230..231: mod_base = OTHER; note = uracil
  modified_base 234: mod_base = OTHER; note = uracil
  modified_base 240..243: mod_base = OTHER; note = uracil
  modified_base 245..247: mod_base = OTHER; note = uracil
  modified_base 253: mod_base = OTHER; note = uracil
  modified_base 258: mod_base = OTHER; note = uracil
  modified_base 271: mod_base = OTHER; note = uracil
  modified_base 281: mod_base = OTHER; note = uracil
  modified_base 284..285: mod_base = OTHER; note = uracil
  modified_base 288: mod_base = OTHER; note = uracil
  modified_base 293: mod_base = OTHER; note = uracil
  modified_base 299: mod_base = OTHER; note = uracil
  modified_base 1: mod_base = m5c
  modified_base 7: mod_base = m5c
  modified_base 26: mod_base = m5c
  modified_base 32: mod_base = m5c
  modified_base 49: mod_base = m5c
  modified_base 72: mod_base = m5c
  modified_base 76: mod_base = m5c
  modified_base 83: mod_base = m5c
  modified_base 85: mod_base = m5c
  modified_base 108: mod_base = m5c
  modified_base 127: mod_base = m5c
  modified_base 142: mod_base = m5c
  modified_base 158: mod_base = m5c
  modified_base 169: mod_base = m5c
  modified_base 184: mod_base = m5c
  modified_base 232: mod_base = m5c
  modified_base 249: mod_base = m5c
  modified_base 260: mod_base = m5c
  modified_base 282: mod_base = m5c
  variation 149: note = CpG site, residue is C if methylated or T(=U) if unmethylated
cgaagtcggtaagtggattttggagcgttgtcgtttgtgttttagttgcgatatgtaataggaaggtttttcgttcgtttttcgcgaagagtttagttgtattttttcggtttttggtgtttttttcgagtgtttttttttcgtggttygagagtatcgggtgggggacggttataggggagtcgttgtagagatgggagatggtttttggagattgaagtagttttttttcgtagggtttttttttacggtttgtgttcggtgggggagtaggggagagtcgtttgttaggtagatttt

SEQ ID NO: 113 - DNA, 300 bp, synthetic construct
  source 1..300: mol_type = other DNA
  modified_base 4..6: mod_base = OTHER; note = uracil
  modified_base 10: mod_base = OTHER; note = uracil
  modified_base 17: mod_base = OTHER; note = uracil
  modified_base 22..24: mod_base = OTHER; note = uracil
  modified_base 28..30: mod_base = OTHER; note = uracil
  modified_base 34..36: mod_base = OTHER; note = uracil
  modified_base 51..53: mod_base = OTHER; note = uracil
  modified_base 57: mod_base = OTHER; note = uracil
  modified_base 61: mod_base = OTHER; note = uracil
  modified_base 64: mod_base = OTHER; note = uracil
  modified_base 66..67: mod_base = OTHER; note = uracil
  modified_base 72: mod_base = OTHER; note = uracil
  modified_base 78..79: mod_base = OTHER; note = uracil
  modified_base 91: mod_base = OTHER; note = uracil
  modified_base 97..99: mod_base = OTHER; note = uracil
  modified_base 105: mod_base = OTHER; note = uracil
  modified_base 113..114: mod_base = OTHER; note = uracil
  modified_base 118..119: mod_base = OTHER; note = uracil
  modified_base 124: mod_base = OTHER; note = uracil
  modified_base 126: mod_base = OTHER; note = uracil
  modified_base 131: mod_base = OTHER; note = uracil
  modified_base 136: mod_base = OTHER; note = uracil
  modified_base 143..144: mod_base = OTHER; note = uracil
  modified_base 151: mod_base = OTHER; note = uracil
  modified_base 153..155: mod_base = OTHER; note = uracil
  modified_base 160..161: mod_base = OTHER; note = uracil
  modified_base 163..164: mod_base = OTHER; note = uracil
  modified_base 180: mod_base = OTHER; note = uracil
  modified_base 182..183: mod_base = OTHER; note = uracil
  modified_base 190: mod_base = OTHER; note = uracil
  modified_base 193..197: mod_base = OTHER; note = uracil
  modified_base 203: mod_base = OTHER; note = uracil
  modified_base 206: mod_base = OTHER; note = uracil
  modified_base 210: mod_base = OTHER; note = uracil
  modified_base 213: mod_base = OTHER; note = uracil
  modified_base 215: mod_base = OTHER; note = uracil
  modified_base 225: mod_base = OTHER; note = uracil
  modified_base 230..231: mod_base = OTHER; note = uracil
  modified_base 233..235: mod_base = OTHER; note = uracil
  modified_base 237..239: mod_base = OTHER; note = uracil
  modified_base 241..242: mod_base = OTHER; note = uracil
  modified_base 244..245: mod_base = OTHER; note = uracil
  modified_base 252: mod_base = OTHER; note = uracil
  modified_base 257..258: mod_base = OTHER; note = uracil
  modified_base 261..262: mod_base = OTHER; note = uracil
  modified_base 268: mod_base = OTHER; note = uracil
  modified_base 274: mod_base = OTHER; note = uracil
  modified_base 281: mod_base = OTHER; note = uracil
  modified_base 286: mod_base = OTHER; note = uracil
  modified_base 291: mod_base = OTHER; note = uracil
  modified_base 296: mod_base = OTHER; note = uracil
  modified_base 37: mod_base = m5c
  modified_base 137: mod_base = m5c
  modified_base 207: mod_base = m5c
  modified_base 253: mod_base = m5c
  variation 149: note = CpG site, residue is C if methylated or T(=U) if unmethylated
  variation 168: note = CpG site, residue is C if methylated or T(=U) if unmethylated
  variation 201: note = CpG site, residue is C if methylated or T(=U) if unmethylated
aggtttaggtagaggttagagtttaagttttgttttcgaaggaaatgtgttttatgttaattattttatagttgaggtttggagggaagttagggattttgggattggttattttggttttgatttattattgtttcggagatttaaaygtattttgagttattagaygtgggtgttaatatttgaggttaattttttgaygttttcggttgttttggaggaagttggtttttttttttattttttgtttttcgtgttagtttggtatagagttaaggggtttggttgggtttggttggg

SEQ ID NO: 114 - DNA, 300 bp, synthetic construct
  source 1..300: mol_type = other DNA
  modified_base 1..2: mod_base = OTHER; note = uracil
  modified_base 5..6: mod_base = OTHER; note = uracil
  modified_base 10..12: mod_base = OTHER; note = uracil
  modified_base 15..16: mod_base = OTHER; note = uracil
  modified_base 20..23: mod_base = OTHER; note = uracil
  modified_base 28: mod_base = OTHER; note = uracil
  modified_base 30: mod_base = OTHER; note = uracil
  modified_base 35..36: mod_base = OTHER; note = uracil
  modified_base 40: mod_base = OTHER; note = uracil
  modified_base 44: mod_base = OTHER; note = uracil
  modified_base 53: mod_base = OTHER; note = uracil
  modified_base 72..73: mod_base = OTHER; note = uracil
  modified_base 76: mod_base = OTHER; note = uracil
  modified_base 79..80: mod_base = OTHER; note = uracil
  modified_base 82..83: mod_base = OTHER; note = uracil
  modified_base 88: mod_base = OTHER; note = uracil
  modified_base 91: mod_base = OTHER; note = uracil
  modified_base 101: mod_base = OTHER; note = uracil
  modified_base 112..113: mod_base = OTHER; note = uracil
  modified_base 115: mod_base = OTHER; note = uracil
  modified_base 125: mod_base = OTHER; note = uracil
  modified_base 127..129: mod_base = OTHER; note = uracil
  modified_base 134: mod_base = OTHER; note = uracil
  modified_base 141: mod_base = OTHER; note = uracil
  modified_base 143: mod_base = OTHER; note = uracil
  modified_base 159: mod_base = OTHER; note = uracil
  modified_base 161: mod_base = OTHER; note = uracil
  modified_base 167: mod_base = OTHER; note = uracil
  modified_base 178: mod_base = OTHER; note = uracil
  modified_base 183..184: mod_base = OTHER; note = uracil
  modified_base 192..193: mod_base = OTHER; note = uracil
  modified_base 197..199: mod_base = OTHER; note = uracil
  modified_base 205..207: mod_base = OTHER; note = uracil
  modified_base 211: mod_base = OTHER; note = uracil
  modified_base 214..216: mod_base = OTHER; note = uracil
  modified_base 218..219: mod_base = OTHER; note = uracil
  modified_base 223..224: mod_base = OTHER; note = uracil
  modified_base 226: mod_base = OTHER; note = uracil
  modified_base 229: mod_base = OTHER; note = uracil
  modified_base 244: mod_base = OTHER; note = uracil
  modified_base 251: mod_base = OTHER; note = uracil
  modified_base 253: mod_base = OTHER; note = uracil
  modified_base 258..259: mod_base = OTHER; note = uracil
  modified_base 268: mod_base = OTHER; note = uracil
  modified_base 273: mod_base = OTHER; note = uracil
  modified_base 279: mod_base = OTHER; note = uracil
  modified_base 281: mod_base = OTHER; note = uracil
  modified_base 285..286: mod_base = OTHER; note = uracil
  modified_base 288: mod_base = OTHER; note = uracil
  modified_base 291..292: mod_base = OTHER; note = uracil
  modified_base 297..298: mod_base = OTHER; note = uracil
  modified_base 46: mod_base = m5c
  modified_base 92: mod_base = m5c
  modified_base 162: mod_base = m5c
  modified_base 262: mod_base = m5c
  variation 98: note = CpG site, residue is C if methylated or T(=U) if unmethylated
  variation 131: note = CpG site, residue is C if methylated or T(=U) if unmethylated
  variation 150: note = CpG site, residue is C if methylated or T(=U) if unmethylated
ttagttaagtttagttaagttttttgattttgtattaggttggtacggaaaataggaggtgggagggaggattagttttttttagagtagtcggaagygttagggggttgattttaggtgttaatatttaygtttggtggtttagggtgygtttaggttttcggaatagtaatgagttaaggttaggataattagttttagggtttttgatttttttttaggttttagttatggagtagttagtatgggatatatttttttcggggatagggtttgggttttgatttttgtttgggtttg

SEQ ID NO: 115 - DNA, 300 bp, synthetic construct
  source 1..300: mol_type = other DNA
  modified_base 1..3: mod_base = OTHER; note = uracil
  modified_base 7: mod_base = OTHER; note = uracil
  modified_base 11: mod_base = OTHER; note = uracil
  modified_base 14: mod_base = OTHER; note = uracil
  modified_base 16..17: mod_base = OTHER; note = uracil
  modified_base 22: mod_base = OTHER; note = uracil
  modified_base 28..29: mod_base = OTHER; note = uracil
  modified_base 41: mod_base = OTHER; note = uracil
  modified_base 47..49: mod_base = OTHER; note = uracil
  modified_base 55: mod_base = OTHER; note = uracil
  modified_base 63..64: mod_base = OTHER; note = uracil
  modified_base 68..69: mod_base = OTHER; note = uracil
  modified_base 74: mod_base = OTHER; note = uracil
  modified_base 76: mod_base = OTHER; note = uracil
  modified_base 81: mod_base = OTHER; note = uracil
  modified_base 86: mod_base = OTHER; note = uracil
  modified_base 93..94: mod_base = OTHER; note = uracil
  modified_base 101: mod_base = OTHER; note = uracil
  modified_base 103..105: mod_base = OTHER; note = uracil
  modified_base 110..111: mod_base = OTHER; note = uracil
  modified_base 113..114: mod_base = OTHER; note = uracil
  modified_base 130: mod_base = OTHER; note = uracil
  modified_base 132..133: mod_base = OTHER; note = uracil
  modified_base 140: mod_base = OTHER; note = uracil
  modified_base 143..147: mod_base = OTHER; note = uracil
  modified_base 153: mod_base = OTHER; note = uracil
  modified_base 156: mod_base = OTHER; note = uracil
  modified_base 160: mod_base = OTHER; note = uracil
  modified_base 163: mod_base = OTHER; note = uracil
  modified_base 165: mod_base = OTHER; note = uracil
  modified_base 175: mod_base = OTHER; note = uracil
  modified_base 180..181: mod_base = OTHER; note = uracil
  modified_base 183..185: mod_base = OTHER; note = uracil
  modified_base 187..189: mod_base = OTHER; note = uracil
  modified_base 191..192: mod_base = OTHER; note = uracil
  modified_base 194..195: mod_base = OTHER; note = uracil
  modified_base 202: mod_base = OTHER; note = uracil
  modified_base 207..208: mod_base = OTHER; note = uracil
  modified_base 211..212: mod_base = OTHER; note = uracil
  modified_base 218: mod_base = OTHER; note = uracil
  modified_base 224: mod_base = OTHER; note = uracil
  modified_base 231: mod_base = OTHER; note = uracil
  modified_base 236: mod_base = OTHER; note = uracil
  modified_base 241: mod_base = OTHER; note = uracil
  modified_base 246: mod_base = OTHER; note = uracil
  modified_base 251: mod_base = OTHER; note = uracil
  modified_base 253: mod_base = OTHER; note = uracil
  modified_base 264: mod_base = OTHER; note = uracil
  modified_base 268: mod_base = OTHER; note = uracil
  modified_base 274..275: mod_base = OTHER; note = uracil
  modified_base 278..279: mod_base = OTHER; note = uracil
  modified_base 286: mod_base = OTHER; note = uracil
  modified_base 296: mod_base = OTHER; note = uracil
  modified_base 87: mod_base = m5c
  modified_base 157: mod_base = m5c
  modified_base 203: mod_base = m5c
  modified_base 259: mod_base = m5c
  modified_base 282: mod_base = m5c
  modified_base 289: mod_base = m5c
  variation 99: note = CpG site, residue is C if methylated or T(=U) if unmethylated
  variation 118: note = CpG site, residue is C if methylated or T(=U) if unmethylated
  variation 151: note = CpG site, residue is C if methylated or T(=U) if unmethylated
tttatgttaattattttatagttgaggtttggagggaagttagggattttgggattggttattttggttttgatttattattgtttcggagatttaaaygtattttgagttattagaygtgggtgttaatatttgaggttaattttttgaygttttcggttgttttggaggaagttggtttttttttttattttttgtttttcgtgttagtttggtatagagttaaggggtttggttgggtttggttgggtttagaaacgtggtagttaggagttagtttgcgggtagcggggtgttggg

SEQ ID NO: 116 - DNA, 300 bp, synthetic construct
  source 1..300: mol_type = other DNA
  modified_base 1..3: mod_base = OTHER; note = uracil
  modified_base 6: mod_base = OTHER; note = uracil
  modified_base 8..10: mod_base = OTHER; note = uracil
  modified_base 13: mod_base = OTHER; note = uracil
  modified_base 16..17: mod_base = OTHER; note = uracil
  modified_base 20: mod_base = OTHER; note = uracil
  modified_base 24: mod_base = OTHER; note = uracil
  modified_base 28: mod_base = OTHER; note = uracil
  modified_base 30..31: mod_base = OTHER; note = uracil
  modified_base 35: mod_base = OTHER; note = uracil
  modified_base 38..39: mod_base = OTHER; note = uracil
  modified_base 46: mod_base = OTHER; note = uracil
  modified_base 51..53: mod_base = OTHER; note = uracil
  modified_base 56..57: mod_base = OTHER; note = uracil
  modified_base 61..63: mod_base = OTHER; note = uracil
  modified_base 66..67: mod_base = OTHER; note = uracil
  modified_base 71..74: mod_base = OTHER; note = uracil
  modified_base 79: mod_base = OTHER; note = uracil
  modified_base 81: mod_base = OTHER; note = uracil
  modified_base 86..87: mod_base = OTHER; note = uracil
  modified_base 91: mod_base = OTHER; note = uracil
  modified_base 95: mod_base = OTHER; note = uracil
  modified_base 104: mod_base = OTHER; note = uracil
  modified_base 123..124: mod_base = OTHER; note = uracil
  modified_base 127: mod_base = OTHER; note = uracil
  modified_base 130..131: mod_base = OTHER; note = uracil
  modified_base 133..134: mod_base = OTHER; note = uracil
  modified_base 139: mod_base = OTHER; note = uracil
  modified_base 142: mod_base = OTHER; note = uracil
  modified_base 152: mod_base = OTHER; note = uracil
  modified_base 163..164: mod_base = OTHER; note = uracil
  modified_base 166: mod_base = OTHER; note = uracil
  modified_base 176: mod_base = OTHER; note = uracil
  modified_base 178..180: mod_base = OTHER; note = uracil
  modified_base 185: mod_base = OTHER; note = uracil
  modified_base 192: mod_base = OTHER; note = uracil
  modified_base 194: mod_base = OTHER; note = uracil
  modified_base 210: mod_base = OTHER; note = uracil
  modified_base 212: mod_base = OTHER; note = uracil
  modified_base 218: mod_base = OTHER; note = uracil
  modified_base 229: mod_base = OTHER; note = uracil
  modified_base 234..235: mod_base = OTHER; note = uracil
  modified_base 243..244: mod_base = OTHER; note = uracil
  modified_base 248..250: mod_base = OTHER; note = uracil
  modified_base 256..258: mod_base = OTHER; note = uracil
  modified_base 262: mod_base = OTHER; note = uracil
  modified_base 265..267: mod_base = OTHER; note = uracil
  modified_base 269..270: mod_base = OTHER; note = uracil
  modified_base 274..275: mod_base = OTHER; note = uracil
  modified_base 277: mod_base = OTHER; note = uracil
  modified_base 280: mod_base = OTHER; note = uracil
  modified_base 295: mod_base = OTHER; note = uracil
  modified_base 11: mod_base = m5c
  modified_base 18: mod_base = m5c
  modified_base 41: mod_base = m5c
  modified_base 97: mod_base = m5c
  modified_base 143: mod_base = m5c
  modified_base 213: mod_base = m5c
  variation 149: note = CpG site, residue is C if methylated or T(=U) if unmethylated
  variation 182: note = CpG site, residue is C if methylated or T(=U) if unmethylated
  variation 201: note = CpG site, residue is C if methylated or T(=U) if unmethylated
tttagtatttcgttgttcgtaggttggtttttgattgttacgtttttgagtttagttaagtttagttaagttttttgattttgtattaggttggtacggaaaataggaggtgggagggaggattagttttttttagagtagtcggaagygttagggggttgattttaggtgttaatatttaygtttggtggtttagggtgygtttaggttttcggaatagtaatgagttaaggttaggataattagttttagggtttttgatttttttttaggttttagttatggagtagttagtatggg

SEQ ID NO: 117 - DNA, 300 bp, synthetic construct
  source 1..300: mol_type = other DNA
  modified_base 1: mod_base = OTHER; note = uracil
  modified_base 3: mod_base = OTHER; note = uracil
  modified_base 5..7: mod_base = OTHER; note = uracil
  modified_base 10: mod_base = OTHER; note = uracil
  modified_base 16: mod_base = OTHER; note = uracil
  modified_base 19: mod_base = OTHER; note = uracil
  modified_base 23..24: mod_base = OTHER; note = uracil
  modified_base 26..27: mod_base = OTHER; note = uracil
  modified_base 29..31: mod_base = OTHER; note = uracil
  modified_base 34..35: mod_base = OTHER; note = uracil
  modified_base 37: mod_base = OTHER; note = uracil
  modified_base 44: mod_base = OTHER; note = uracil
  modified_base 60: mod_base = OTHER; note = uracil
  modified_base 76..78: mod_base = OTHER; note = uracil
  modified_base 80: mod_base = OTHER; note = uracil
  modified_base 84: mod_base = OTHER; note = uracil
  modified_base 88..89: mod_base = OTHER; note = uracil
  modified_base 96..98: mod_base = OTHER; note = uracil
  modified_base 101..102: mod_base = OTHER; note = uracil
  modified_base 104..106: mod_base = OTHER; note = uracil
  modified_base 111: mod_base = OTHER; note = uracil
  modified_base 113..114: mod_base = OTHER; note = uracil
  modified_base 119..122: mod_base = OTHER; note = uracil
  modified_base 125..128: mod_base = OTHER; note = uracil
  modified_base 132: mod_base = OTHER; note = uracil
  modified_base 134..135: mod_base = OTHER; note = uracil
  modified_base 139..143: mod_base = OTHER; note = uracil
  modified_base 156..157: mod_base = OTHER; note = uracil
  modified_base 166..167: mod_base = OTHER; note = uracil
  modified_base 170..172: mod_base = OTHER; note = uracil
  modified_base 180: mod_base = OTHER; note = uracil
  modified_base 183: mod_base = OTHER; note = uracil
  modified_base 190..191: mod_base = OTHER; note = uracil
  modified_base 198..201: mod_base = OTHER; note = uracil
  modified_base 204..206: mod_base = OTHER; note = uracil
  modified_base 209: mod_base = OTHER; note = uracil
  modified_base 215: mod_base = OTHER; note = uracil
  modified_base 218..222: mod_base = OTHER; note = uracil
  modified_base 224..225: mod_base = OTHER; note = uracil
  modified_base 228..231: mod_base = OTHER; note = uracil
  modified_base 234..235: mod_base = OTHER; note = uracil
  modified_base 243: mod_base = OTHER; note = uracil
  modified_base 247..250: mod_base = OTHER; note = uracil
  modified_base 252..254: mod_base = OTHER; note = uracil
  modified_base 259: mod_base = OTHER; note = uracil
  modified_base 261: mod_base = OTHER; note = uracil
  modified_base 266..268: mod_base = OTHER; note = uracil
  modified_base 271: mod_base = OTHER; note = uracil
  modified_base 274..276: mod_base = OTHER; note = uracil
  modified_base 283..285: mod_base = OTHER; note = uracil
  modified_base 291: mod_base = OTHER; note = uracil
  modified_base 297..298: mod_base = OTHER; note = uracil
  modified_base 8: mod_base = m5c
  modified_base 20: mod_base = m5c
  modified_base 32: mod_base = m5c
  modified_base 40: mod_base = m5c
  modified_base 57: mod_base = m5c
  modified_base 117: mod_base = m5c
  modified_base 146: mod_base = m5c
  modified_base 158: mod_base = m5c
  modified_base 164: mod_base = m5c
  modified_base 173: mod_base = m5c
  modified_base 193: mod_base = m5c
  modified_base 195: mod_base = m5c
  modified_base 226: mod_base = m5c
  modified_base 264: mod_base = m5c
  modified_base 281: mod_base = m5c
  modified_base 287: mod_base = m5c
  modified_base 292: mod_base = m5c
  modified_base 299: mod_base = m5c
  variation 150: note = CpG site, residue is C if methylated or T(=U) if unmethylated
tttttttcgtagttttattcgttttttttttcgtttttgcgagttgggtttggggacgtttgggtggaatgtagatttataggttgtttttggtgttttttttttttgttttttagcgttttagttttagatattagttttttagcgggygaaagttcgggagcgtttttttcgaaagatattagggtgttacgcggtttttgttttgtagaagtatttttttttcgtttttgtttggaaagtaggtttttttttaagttttgcgttttttttttttgggcgttttcggatcgtggttcg

SEQ ID NO: 118 - DNA, 300 bp, synthetic construct
  source 1..300: mol_type = other DNA
  modified_base 5..6: mod_base = OTHER; note = uracil
  modified_base 12: mod_base = OTHER; note = uracil
  modified_base 21..23: mod_base = OTHER; note = uracil
  modified_base 38: mod_base = OTHER; note = uracil
  modified_base 43: mod_base = OTHER; note = uracil
  modified_base 55..56: mod_base = OTHER; note = uracil
  modified_base 59: mod_base = OTHER; note = uracil
  modified_base 63..64: mod_base = OTHER; note = uracil
  modified_base 68: mod_base = OTHER; note = uracil
  modified_base 87: mod_base = OTHER; note = uracil
  modified_base 90: mod_base = OTHER; note = uracil
  modified_base 93: mod_base = OTHER; note = uracil
  modified_base 98: mod_base = OTHER; note = uracil
  modified_base 104: mod_base = OTHER; note = uracil
  modified_base 112: mod_base = OTHER; note = uracil
  modified_base 114..116: mod_base = OTHER; note = uracil
  modified_base 123: mod_base = OTHER; note = uracil
  modified_base 138: mod_base = OTHER; note = uracil
  modified_base 140..141: mod_base = OTHER; note = uracil
  modified_base 146: mod_base = OTHER; note = uracil
  modified_base 152..153: mod_base = OTHER; note = uracil
  modified_base 156: mod_base = OTHER; note = uracil
  modified_base 164: mod_base = OTHER; note = uracil
  modified_base 171: mod_base = OTHER; note = uracil
  modified_base 177: mod_base = OTHER; note = uracil
  modified_base 185: mod_base = OTHER; note = uracil
  modified_base 193: mod_base = OTHER; note = uracil
  modified_base 206: mod_base = OTHER; note = uracil
  modified_base 208..209: mod_base = OTHER; note = uracil
  modified_base 215: mod_base = OTHER; note = uracil
  modified_base 218..219: mod_base = OTHER; note = uracil
  modified_base 227: mod_base = OTHER; note = uracil
  modified_base 230: mod_base = OTHER; note = uracil
  modified_base 234..235: mod_base = OTHER; note = uracil
  modified_base 237..239: mod_base = OTHER; note = uracil
  modified_base 246..249: mod_base = OTHER; note = uracil
  modified_base 253..255: mod_base = OTHER; note = uracil
  modified_base 258: mod_base = OTHER; note = uracil
  modified_base 262: mod_base = OTHER; note = uracil
  modified_base 289: mod_base = OTHER; note = uracil
  modified_base 1: mod_base = m5c
  modified_base 8: mod_base = m5c
  modified_base 13: mod_base = m5c
  modified_base 19: mod_base = m5c
  modified_base 36: mod_base = m5c
  modified_base 74: mod_base = m5c
  modified_base 105: mod_base = m5c
  modified_base 107: mod_base = m5c
  modified_base 127: mod_base = m5c
  modified_base 136: mod_base = m5c
  modified_base 142: mod_base = m5c
  modified_base 154: mod_base = m5c
  modified_base 183: mod_base = m5c
  modified_base 243: mod_base = m5c
  modified_base 260: mod_base = m5c
  modified_base 268: mod_base = m5c
  modified_base 280: mod_base = m5c
  modified_base 292: mod_base = m5c
  variation 150: note = CpG site, residue is C if methylated or T(=U) if unmethylated
cgggttacggttcgagggcgtttagggaagaagggcgtagagtttagggaggggtttgttttttaggtaggggcgggagggggatgtttttgtagggtaggggtcgcgtggtattttgatgtttttcggggaaggcgttttcgggttttygttcgttgggggattggtgtttggggttggggcgttggagaatagggaggaagggtattaaggatagtttgtgggtttatattttatttagacgtttttaaatttagttcgtagaggcggggaggaggacggatgaaattgcggggagag

SEQ ID NO: 119 - DNA, 300 bp, synthetic construct
  source 1..300: mol_type = other DNA
  modified_base 17: mod_base = OTHER; note = uracil
  modified_base 20: mod_base = OTHER; note = uracil
  modified_base 28..31: mod_base = OTHER; note = uracil
  modified_base 34: mod_base = OTHER; note = uracil
  modified_base 36..37: mod_base = OTHER; note = uracil
  modified_base 40: mod_base = OTHER; note = uracil
  modified_base 42: mod_base = OTHER; note = uracil
  modified_base 50: mod_base = OTHER; note = uracil
  modified_base 54..56: mod_base = OTHER; note = uracil
  modified_base 64..65: mod_base = OTHER; note = uracil
  modified_base 69..71: mod_base = OTHER; note = uracil
  modified_base 86: mod_base = OTHER; note = uracil
  modified_base 92..93: mod_base = OTHER; note = uracil
  modified_base 106: mod_base = OTHER; note = uracil
  modified_base 111: mod_base = OTHER; note = uracil
  modified_base 119: mod_base = OTHER; note = uracil
  modified_base 124..125: mod_base = OTHER; note = uracil
  modified_base 127..129: mod_base = OTHER; note = uracil
  modified_base 132: mod_base = OTHER; note = uracil
  modified_base 139: mod_base = OTHER; note = uracil
  modified_base 143..144: mod_base = OTHER; note = uracil
  modified_base 152: mod_base = OTHER; note = uracil
  modified_base 157: mod_base = OTHER; note = uracil
  modified_base 159: mod_base = OTHER; note = uracil
  modified_base 164: mod_base = OTHER; note = uracil
  modified_base 167: mod_base = OTHER; note = uracil
  modified_base 171: mod_base = OTHER; note = uracil
  modified_base 173: mod_base = OTHER; note = uracil
  modified_base 177: mod_base = OTHER; note = uracil
  modified_base 181: mod_base = OTHER; note = uracil
  modified_base 184..186: mod_base = OTHER; note = uracil
  modified_base 188..191: mod_base = OTHER; note = uracil
  modified_base 195..197: mod_base = OTHER; note = uracil
  modified_base 201..203: mod_base = OTHER; note = uracil
  modified_base 207..208: mod_base = OTHER; note = uracil
  modified_base 210: mod_base = OTHER; note = uracil
  modified_base 215..217: mod_base = OTHER; note = uracil
  modified_base 219..221: mod_base = OTHER; note = uracil
  modified_base 224: mod_base = OTHER; note = uracil
  modified_base 229: mod_base = OTHER; note = uracil
  modified_base 234: mod_base = OTHER; note = uracil
  modified_base 243: mod_base = OTHER; note = uracil
  modified_base 250..251: mod_base = OTHER; note = uracil
  modified_base 253..254: mod_base = OTHER; note = uracil
  modified_base 256..257: mod_base = OTHER; note = uracil
  modified_base 260..261: mod_base = OTHER; note = uracil
  modified_base 263: mod_base = OTHER; note = uracil
  modified_base 269: mod_base = OTHER; note = uracil
  modified_base 271: mod_base = OTHER; note = uracil
  modified_base 276: mod_base = OTHER; note = uracil
  modified_base 278: mod_base = OTHER; note = uracil
  modified_base 281..283: mod_base = OTHER; note = uracil
  modified_base 285: mod_base = OTHER; note = uracil
  modified_base 287..289: mod_base = OTHER; note = uracil
  modified_base 292..295: mod_base = OTHER; note = uracil
  modified_base 300: mod_base = OTHER; note = uracil
  modified_base 15: mod_base = m5c
  modified_base 32: mod_base = m5c
  modified_base 38: mod_base = m5c
  modified_base 75: mod_base = m5c
  modified_base 80: mod_base = m5c
  modified_base 94: mod_base = m5c
  modified_base 145: mod_base = m5c
  modified_base 153: mod_base = m5c
  modified_base 162: mod_base = m5c
  modified_base 165: mod_base = m5c
  modified_base 175: mod_base = m5c
  modified_base 182: mod_base = m5c
  modified_base 213: mod_base = m5c
  modified_base 235: mod_base = m5c
  modified_base 247: mod_base = m5c
  modified_base 258: mod_base = m5c
  modified_base 267: mod_base = m5c
  modified_base 290: mod_base = m5c
  variation 150: note = CpG site, residue is C if methylated or T(=U) if unmethylated
agaggagtggggagcgtagtagggtggttttcgttttcgtttagaggagttggttttttaaggttaggtttaggcgggtcgggaatagagattcgggaatgtgggttggattggggagtagagttatttagtatgagttattttcgtttygtcggatttttcgtcgttggttttcgtttgtcgtttttttttggttttggttttggtttttgcgttttttttgtagagttggttcgggtgggttggcggtttttattcgttataagcgtatagggttttgtttatttttcgttttttttt

SEQ ID NO: 120 - DNA, 300 bp, synthetic construct
  source 1..300: mol_type = other DNA
  modified_base 21: mod_base = OTHER; note = uracil
  modified_base 26..28: mod_base = OTHER; note = uracil
  modified_base 35: mod_base = OTHER; note = uracil
  modified_base 52: mod_base = OTHER; note = uracil
  modified_base 55..56: mod_base = OTHER; note = uracil
  modified_base 59..61: mod_base = OTHER; note = uracil
  modified_base 63..64: mod_base = OTHER; note = uracil
  modified_base 69..70: mod_base = OTHER; note = uracil
  modified_base 73: mod_base = OTHER; note = uracil
  modified_base 75: mod_base = OTHER; note = uracil
  modified_base 78: mod_base = OTHER; note = uracil
  modified_base 89: mod_base = OTHER; note = uracil
  modified_base 95..96: mod_base = OTHER; note = uracil
  modified_base 101..102: mod_base = OTHER; note = uracil
  modified_base 107..108: mod_base = OTHER; note = uracil
  modified_base 121: mod_base = OTHER; note = uracil
  modified_base 131..132: mod_base = OTHER; note = uracil
  modified_base 146: mod_base = OTHER; note = uracil
  modified_base 164: mod_base = OTHER; note = uracil
  modified_base 166: mod_base = OTHER; note = uracil
  modified_base 170: mod_base = OTHER; note = uracil
  modified_base 178: mod_base = OTHER; note = uracil
  modified_base 180: mod_base = OTHER; note = uracil
  modified_base 183: mod_base = OTHER; note = uracil
  modified_base 185..188: mod_base = OTHER; note = uracil
  modified_base 192..193: mod_base = OTHER; note = uracil
  modified_base 196..198: mod_base = OTHER; note = uracil
  modified_base 200: mod_base = OTHER; note = uracil
  modified_base 204..205: mod_base = OTHER; note = uracil
  modified_base 211: mod_base = OTHER; note = uracil
  modified_base 213: mod_base = OTHER; note = uracil
  modified_base 218..219: mod_base = OTHER; note = uracil
  modified_base 223..224: mod_base = OTHER; note = uracil
  modified_base 227..228: mod_base = OTHER; note = uracil
  modified_base 233..234: mod_base = OTHER; note = uracil
  modified_base 238..239: mod_base = OTHER; note = uracil
  modified_base 248..249: mod_base = OTHER; note = uracil
  modified_base 252: mod_base = OTHER; note = uracil
  modified_base 254..255: mod_base = OTHER; note = uracil
  modified_base 257: mod_base = OTHER; note = uracil
  modified_base 274..275: mod_base = OTHER; note = uracil
  modified_base 277..279: mod_base = OTHER; note = uracil
  modified_base 282: mod_base = OTHER; note = uracil
  modified_base 287: mod_base = OTHER; note = uracil
  modified_base 289..292: mod_base = OTHER; note = uracil
  modified_base 294: mod_base = OTHER; note = uracil
  modified_base 296..297: mod_base = OTHER; note = uracil
  modified_base 299: mod_base = OTHER; note = uracil
  modified_base 10: mod_base = m5c
  modified_base 33: mod_base = m5c
  modified_base 42: mod_base = m5c
  modified_base 53: mod_base = m5c
  modified_base 65: mod_base = m5c
  modified_base 87: mod_base = m5c
  modified_base 118: mod_base = m5c
  modified_base 125: mod_base = m5c
  modified_base 135: mod_base = m5c
  modified_base 138: mod_base = m5c
  modified_base 147: mod_base = m5c
  modified_base 155: mod_base = m5c
  modified_base 206: mod_base = m5c
  modified_base 220: mod_base = m5c
  modified_base 225: mod_base = m5c
  modified_base 262: mod_base = m5c
  modified_base 268: mod_base = m5c
  modified_base 285: mod_base = m5c
  variation 150: note = CpG site, residue is C if methylated or T(=U) if unmethylated
gaaaaggggcggggagtgggtagagttttgtgcgtttgtggcgggtggaggtcgttagtttattcggattagttttgtagggagggcgtagaggttagggttagggttaggggagggcggtaagcgagagttagcggcgaagagttcggygaaacgggaatgatttatgttgggtggttttgttttttagtttagtttatattttcgggtttttgttttcgattcgtttgggtttggttttaaagggttagtttttttgagcgggagcgggggttattttgttgcgttttttattttttt

SEQ ID NO: 121 - DNA, 300 bp, synthetic construct
  source 1..300: mol_type = other DNA
  modified_base 2: mod_base = OTHER; note = uracil
  modified_base 15: mod_base = OTHER; note = uracil
  modified_base 17: mod_base = OTHER; note = uracil
  modified_base 21..22: mod_base = OTHER; note = uracil
  modified_base 29..31: mod_base = OTHER; note = uracil
  modified_base 34: mod_base = OTHER; note = uracil
  modified_base 36: mod_base = OTHER; note = uracil
  modified_base 61: mod_base = OTHER; note = uracil
  modified_base 63..64: mod_base = OTHER; note = uracil
  modified_base 66: mod_base = OTHER; note = uracil
  modified_base 71: mod_base = OTHER; note = uracil
  modified_base 84..85: mod_base = OTHER; note = uracil
  modified_base 87: mod_base = OTHER; note = uracil
  modified_base 91: mod_base = OTHER; note = uracil
  modified_base 93: mod_base = OTHER; note = uracil
  modified_base 96: mod_base = OTHER; note = uracil
  modified_base 102: mod_base = OTHER; note = uracil
  modified_base 116: mod_base = OTHER; note = uracil
  modified_base 121: mod_base = OTHER; note = uracil
  modified_base 136: mod_base = OTHER; note = uracil
  modified_base 144..145: mod_base = OTHER; note = uracil
  modified_base 148: mod_base = OTHER; note = uracil
  modified_base 160: mod_base = OTHER; note = uracil
  modified_base 166: mod_base = OTHER; note = uracil
  modified_base 177: mod_base = OTHER; note = uracil
  modified_base 183..184: mod_base = OTHER; note = uracil
  modified_base 201: mod_base = OTHER; note = uracil
  modified_base 208..209: mod_base = OTHER; note = uracil
  modified_base 219..220: mod_base = OTHER; note = uracil
  modified_base 222: mod_base = OTHER; note = uracil
  modified_base 225: mod_base = OTHER; note = uracil
  modified_base 227: mod_base = OTHER; note = uracil
  modified_base 229..230: mod_base = OTHER; note = uracil
  modified_base 233..234: mod_base = OTHER; note = uracil
  modified_base 242: mod_base = OTHER; note = uracil
  modified_base 248: mod_base = OTHER; note = uracil
  modified_base 252: mod_base = OTHER; note = uracil
  modified_base 254: mod_base = OTHER; note = uracil
  modified_base 258: mod_base = OTHER; note = uracil
  modified_base 260: mod_base = OTHER; note = uracil
  modified_base 270: mod_base = OTHER; note = uracil
  modified_base 277..278: mod_base = OTHER; note = uracil
  modified_base 281: mod_base = OTHER; note = uracil
  modified_base 288..289: mod_base = OTHER; note = uracil
  modified_base 3: mod_base = m5c
  modified_base 7: mod_base = m5c
  modified_base 9: mod_base = m5c
  modified_base 46: mod_base = m5c
  modified_base 117: mod_base = m5c
  modified_base 185: mod_base = m5c
  modified_base 192: mod_base = m5c
  modified_base 217: mod_base = m5c
  variation 151: note = CpG site, residue is C if methylated or T(=U) if unmethylated
gtcgagcgcggtggtttatgtttgtaattttagtattttgggagacggaggtgggtggattattttaggttagaagtttgagatttttgtttttattgaaattataaaaaattggtcgggtatggtggtgggtgtttgtagttttagttaygtggtaagttgaggtaggagaatgatttgaattcgggaggcggaggttgtagtgagttaggattgcgttattgtattttagtttgggagatagagttagattttgttttaaaaaaaagttatgggtttgtaggatgtttaatataaaag

SEQ ID NO: 122 - DNA, 300 bp, synthetic construct
  source 1..300: mol_type = other DNA
  modified_base 1: mod_base = OTHER; note = uracil
  modified_base 14: mod_base = OTHER; note = uracil
  modified_base 17..18: mod_base = OTHER; note = uracil
  modified_base 21: mod_base = OTHER; note = uracil
  modified_base 25..27: mod_base = OTHER; note = uracil
  modified_base 32: mod_base = OTHER; note = uracil
  modified_base 45: mod_base = OTHER; note = uracil
  modified_base 51: mod_base = OTHER; note = uracil
  modified_base 55: mod_base = OTHER; note = uracil
  modified_base 57: mod_base = OTHER; note = uracil
  modified_base 61: mod_base = OTHER; note = uracil
  modified_base 63..65: mod_base = OTHER; note = uracil
  modified_base 69: mod_base = OTHER; note = uracil
  modified_base 77: mod_base = OTHER; note = uracil
  modified_base 85: mod_base = OTHER; note = uracil
  modified_base 89..90: mod_base = OTHER; note = uracil
  modified_base 94: mod_base = OTHER; note = uracil
  modified_base 96: mod_base = OTHER; note = uracil
  modified_base 98: mod_base = OTHER; note = uracil
  modified_base 101: mod_base = OTHER; note = uracil
  modified_base 104..105: mod_base = OTHER; note = uracil
  modified_base 107: mod_base = OTHER; note = uracil
  modified_base 110..111: mod_base = OTHER; note = uracil
  modified_base 113..114: mod_base = OTHER; note = uracil
  modified_base 121: mod_base = OTHER; note = uracil
  modified_base 126: mod_base = OTHER; note = uracil
  modified_base 130: mod_base = OTHER; note = uracil
  modified_base 132..133: mod_base = OTHER; note = uracil
  modified_base 136..137: mod_base = OTHER; note = uracil
  modified_base 139: mod_base = OTHER; note = uracil
  modified_base 142: mod_base = OTHER; note = uracil
  modified_base 146..147: mod_base = OTHER; note = uracil
  modified_base 154: mod_base = OTHER; note = uracil
  modified_base 160: mod_base = OTHER; note = uracil
  modified_base 163: mod_base = OTHER; note = uracil
  modified_base 167: mod_base = OTHER; note = uracil
  modified_base 169..171: mod_base = OTHER; note = uracil
  modified_base 173..174: mod_base = OTHER; note = uracil
  modified_base 176..177: mod_base = OTHER; note = uracil
  modified_base 181..182: mod_base = OTHER; note = uracil
  modified_base 186..187: mod_base = OTHER; note = uracil
  modified_base 203: mod_base = OTHER; note = uracil
  modified_base 212: mod_base = OTHER; note = uracil
  modified_base 219: mod_base = OTHER; note = uracil
  modified_base 221: mod_base = OTHER; note = uracil
  modified_base 225: mod_base = OTHER; note = uracil
  modified_base 228: mod_base = OTHER; note = uracil
  modified_base 232..233: mod_base = OTHER; note = uracil
  modified_base 243..244: mod_base = OTHER; note = uracil
  modified_base 246..248: mod_base = OTHER; note = uracil
  modified_base 250..251: mod_base = OTHER; note = uracil
  modified_base 253: mod_base = OTHER; note = uracil
  modified_base 257: mod_base = OTHER; note = uracil
  modified_base 259..261: mod_base = OTHER; note = uracil
  modified_base 268: mod_base = OTHER; note = uracil
  modified_base 277: mod_base = OTHER; note = uracil
  modified_base 281: mod_base = OTHER; note = uracil
  modified_base 287..288: mod_base = OTHER; note = uracil
  modified_base 290: mod_base = OTHER; note = uracil
  modified_base 295: mod_base = OTHER; note = uracil
  modified_base 300: mod_base = OTHER; note = uracil
  modified_base 83: mod_base = m5c
  modified_base 108: mod_base = m5c
  modified_base 115: mod_base = m5c
  modified_base 183: mod_base = m5c
  modified_base 254: mod_base = m5c
  modified_base 291: mod_base = m5c
  modified_base 293: mod_base = m5c
  modified_base 297: mod_base = m5c
  variation 149: note = CpG site, residue is C if methylated or T(=U) if unmethylated
tttttatattaggtattttgtaggtttatagtttttttttgagatagagtttgattttgttttttaggttggagtgtagtggcgtaattttggtttattgtaattttcgtttttcgggtttaagttatttttttgttttagtttattaygtagttggaattatagatatttattattatgttcggttaattttttatagttttagtagagatagaggttttaaatttttgatttgaggtgatttatttattttcgttttttaaagtgttgggattataggtatgagttatcgcgttcggt

SEQ ID NO: 123 - DNA, 300 bp, synthetic construct
  source 1..300: mol_type = other DNA
  modified_base 1: mod_base = OTHER; note = uracil
  modified_base 5: mod_base = OTHER; note = uracil
  modified_base 7..8: mod_base = OTHER; note = uracil
  modified_base 14: mod_base = OTHER; note = uracil
  modified_base 16: mod_base = OTHER; note = uracil
  modified_base 20: mod_base = OTHER; note = uracil
  modified_base 26: mod_base = OTHER; note = uracil
  modified_base 29: mod_base = OTHER; note = uracil
  modified_base 31: mod_base = OTHER; note = uracil
  modified_base 36: mod_base = OTHER; note = uracil
  modified_base 38..39: mod_base = OTHER; note = uracil
  modified_base 43: mod_base = OTHER; note = uracil
  modified_base 45: mod_base = OTHER; note = uracil
  modified_base 48..49: mod_base = OTHER; note = uracil
  modified_base 52: mod_base = OTHER; note = uracil
  modified_base 60: mod_base = OTHER; note = uracil
  modified_base 66: mod_base = OTHER; note = uracil
  modified_base 90: mod_base = OTHER; note = uracil
  modified_base 97: mod_base = OTHER; note = uracil
  modified_base 101: mod_base = OTHER; note = uracil
  modified_base 111: mod_base = OTHER; note = uracil
  modified_base 134: mod_base = OTHER; note = uracil
  modified_base 138..139: mod_base = OTHER; note = uracil
  modified_base 141: mod_base = OTHER; note = uracil
  modified_base 143: mod_base = OTHER; note = uracil
  modified_base 145..146: mod_base = OTHER; note = uracil
  modified_base 149: mod_base = OTHER; note = uracil
  modified_base 154: mod_base = OTHER; note = uracil
  modified_base 157..158: mod_base = OTHER; note = uracil
  modified_base 172..176: mod_base = OTHER; note = uracil
  modified_base 180: mod_base = OTHER; note = uracil
  modified_base 188: mod_base = OTHER; note = uracil
  modified_base 195: mod_base = OTHER; note = uracil
  modified_base 197: mod_base = OTHER; note = uracil
  modified_base 199: mod_base = OTHER; note = uracil
  modified_base 204..205: mod_base = OTHER; note = uracil
  modified_base 214: mod_base = OTHER; note = uracil
  modified_base 216: mod_base = OTHER; note = uracil
  modified_base 226: mod_base = OTHER; note = uracil
  modified_base 228: mod_base = OTHER; note = uracil
  modified_base 230: mod_base = OTHER; note = uracil
  modified_base 232: mod_base = OTHER; note = uracil
  modified_base 234..235: mod_base = OTHER; note = uracil
  modified_base 239..241: mod_base = OTHER; note = uracil
  modified_base 244..247: mod_base = OTHER; note = uracil
  modified_base 252..253: mod_base = OTHER; note = uracil
  modified_base 259: mod_base = OTHER; note = uracil
  modified_base 261: mod_base = OTHER; note = uracil
  modified_base 271: mod_base = OTHER; note = uracil
  modified_base 279..280: mod_base = OTHER; note = uracil
  modified_base 284: mod_base = OTHER; note = uracil
  modified_base 293..294: mod_base = OTHER; note = uracil
  modified_base 296: mod_base = OTHER; note = uracil
  modified_base 299..300: mod_base = OTHER; note = uracil
  modified_base 3: mod_base = m5c
  modified_base 46: mod_base = m5c
  modified_base 128: mod_base = m5c
  modified_base 181: mod_base = m5c
  modified_base 190: mod_base = m5c
  modified_base 274: mod_base = m5c
  modified_base 276: mod_base = m5c
  modified_base 288: mod_base = m5c
  variation 151: note = CpG site, residue is C if methylated or T(=U) if unmethylated
tacgtttttgttttatttttatgttttgttttgtatatttggtttcgttttttagatagtaatagtagaattagtgaaagtattaaagtttttgatttttttgagaagagtatagaagaaataatgacgtaagttgttttttttttagttyggttatttaaaagggaaaggttttttgttcggtggatacgtgatttatatgattttattaattattggagatgatttatattttttattttgtttttttgttttgtatataataaataatagcgcgattaggtattcggggttattgtt

SEQ ID NO: 124 - DNA, 300 bp, synthetic construct
  source 1..300: mol_type = other DNA
  modified_base 3: mod_base = OTHER; note = uracil
  modified_base 9..11: mod_base = OTHER; note = uracil
  modified_base 18..19: mod_base = OTHER; note = uracil
  modified_base 28: mod_base = OTHER; note = uracil
  modified_base 45: mod_base = OTHER; note = uracil
  modified_base 50: mod_base = OTHER; note = uracil
  modified_base 58: mod_base = OTHER; note = uracil
  modified_base 77: mod_base = OTHER; note = uracil
  modified_base 80: mod_base = OTHER; note = uracil
  modified_base 82..83: mod_base = OTHER; note = uracil
  modified_base 99: mod_base = OTHER; note = uracil
  modified_base 108: mod_base = OTHER; note = uracil
  modified_base 115..116: mod_base = OTHER; note = uracil
  modified_base 118: mod_base = OTHER; note = uracil
  modified_base 123: mod_base = OTHER; note = uracil
  modified_base 130..131: mod_base = OTHER; note = uracil
  modified_base 135..137: mod_base = OTHER; note = uracil
  modified_base 148: mod_base = OTHER; note = uracil
  modified_base 153: mod_base = OTHER; note = uracil
  modified_base 165: mod_base = OTHER; note = uracil
  modified_base 168: mod_base = OTHER; note = uracil
  modified_base 175: mod_base = OTHER; note = uracil
  modified_base 183: mod_base = OTHER; note = uracil
  modified_base 186: mod_base = OTHER; note = uracil
  modified_base 191: mod_base = OTHER; note = uracil
  modified_base 193: mod_base = OTHER; note = uracil
  modified_base 196: mod_base = OTHER; note = uracil
  modified_base 198: mod_base = OTHER; note = uracil
  modified_base 207: mod_base = OTHER; note = uracil
  modified_base 213: mod_base = OTHER; note = uracil
  modified_base 221: mod_base = OTHER; note = uracil
  modified_base 225: mod_base = OTHER; note = uracil
  modified_base 227: mod_base = OTHER; note = uracil
  modified_base 233: mod_base = OTHER; note = uracil
  modified_base 236: mod_base = OTHER; note = uracil
  modified_base 242: mod_base = OTHER; note = uracil
  modified_base 246: mod_base = OTHER; note = uracil
  modified_base 259..260: mod_base = OTHER; note = uracil
  modified_base 268: mod_base = OTHER; note = uracil
  modified_base 273: mod_base = OTHER; note = uracil
  modified_base 278: mod_base = OTHER; note = uracil
  modified_base 291: mod_base = OTHER; note = uracil
  modified_base 12: mod_base = m5c
  modified_base 24: mod_base = m5c
  modified_base 26: mod_base = m5c
  modified_base 110: mod_base = m5c
  modified_base 119: mod_base = m5c
  modified_base 172: mod_base = m5c
  modified_base 254: mod_base = m5c
  modified_base 297: mod_base = m5c
  variation 149: note = CpG site, residue is C if methylated or T(=U) if unmethylated
ggtagtggtttcgaatgtttggtcgcgttgttatttattgtgtataaggtaaaggggtagggtaaggagtgtgagttatttttagtgattaataaggttatgtgagttacgtgtttatcggatagggggttttttttttttaggtagtygagttggagagaggatagtttacgttattattttttttatgttttttttagaaagattaaagattttaatatttttattaattttgttattgttatttagaaggcggagttaggtgtatagagtagaatatgaaagtgaaataggagcgtg

SEQ ID NO: 125 - DNA, 300 bp, synthetic construct
  source 1..300: mol_type = other DNA
  modified_base 3..7: mod_base = OTHER; note = uracil
  modified_base 18: mod_base = OTHER; note = uracil
  modified_base 26: mod_base = OTHER; note = uracil
  modified_base 30..31: mod_base = OTHER; note = uracil
  modified_base 34: mod_base = OTHER; note = uracil
  modified_base 45: mod_base = OTHER; note = uracil
  modified_base 55..57: mod_base = OTHER; note = uracil
  modified_base 60: mod_base = OTHER; note = uracil
  modified_base 66..67: mod_base = OTHER; note = uracil
  modified_base 83: mod_base = OTHER; note = uracil
  modified_base 87: mod_base = OTHER; note = uracil
  modified_base 94: mod_base = OTHER; note = uracil
  modified_base 96: mod_base = OTHER; note = uracil
  modified_base 111..112: mod_base = OTHER; note = uracil
  modified_base 124..126: mod_base = OTHER; note = uracil
  modified_base 144: mod_base = OTHER; note = uracil
  modified_base 147: mod_base = OTHER; note = uracil
  modified_base 158: mod_base = OTHER; note = uracil
  modified_base 165..167: mod_base = OTHER; note = uracil
  modified_base 171..173: mod_base = OTHER; note = uracil
  modified_base 176: mod_base = OTHER; note = uracil
  modified_base 184..186: mod_base = OTHER; note = uracil
  modified_base 188: mod_base = OTHER; note = uracil
  modified_base 194: mod_base = OTHER; note = uracil
  modified_base 214..218: mod_base = OTHER; note = uracil
  modified_base 222: mod_base = OTHER; note = uracil
  modified_base 231: mod_base = OTHER; note = uracil
  modified_base 234: mod_base = OTHER; note = uracil
  modified_base 239..240: mod_base = OTHER; note = uracil
  modified_base 246: mod_base = OTHER; note = uracil
  modified_base 248: mod_base = OTHER; note = uracil
  modified_base 253..254: mod_base = OTHER; note = uracil
  modified_base 262..264: mod_base = OTHER; note = uracil
  modified_base 270: mod_base = OTHER; note = uracil
  modified_base 279: mod_base = OTHER; note = uracil
  modified_base 283..284: mod_base = OTHER; note = uracil
  modified_base 293..295: mod_base = OTHER; note = uracil
  modified_base 300: mod_base = OTHER; note = uracil
  modified_base 12: mod_base = m5c
  modified_base 19: mod_base = m5c
  modified_base 32: mod_base = m5c
  modified_base 69: mod_base = m5c
  modified_base 84: mod_base = m5c
  modified_base 88: mod_base = m5c
  modified_base 91: mod_base = m5c
  modified_base 116: mod_base = m5c
  modified_base 121: mod_base = m5c
  modified_base 127: mod_base = m5c
  modified_base 154: mod_base = m5c
  modified_base 179: mod_base = m5c
  modified_base 189: mod_base = m5c
  modified_base 201: mod_base = m5c
  modified_base 232: mod_base = m5c
  modified_base 250: mod_base = m5c
  variation 145: note = CpG site, residue is C if methylated or T(=U) if unmethylated
  variation 152: note = CpG site, residue is C if methylated or T(=U) if unmethylated
  variation 156: note = CpG site, residue is C if methylated or T(=U) if unmethylated
agttttttgggcggggttcggggagtaggttcgtatttggaggatagggtgtgatttatttgaattttcgttaaagtaaaagtcgatcgacggttttgggaggtttgaggtttggcggggcggtttcgggaagtgatttgtggtygttaggygcgygttggaaatttttttttatttgcggagtttatcggagttgtgatcggaggaggaatttttttaggtagggaggatcgtagggttttttttattcgttttgaggggttttggggtttggggagtaaatttggggtgatttatttt

SEQ ID NO: 126 - DNA, 300 bp, synthetic construct
  source 1..300: mol_type = other DNA
  modified_base 10: mod_base = OTHER; note = uracil
  modified_base 12..15: mod_base = OTHER; note = uracil
  modified_base 23: mod_base = OTHER; note = uracil
  modified_base 25..28: mod_base = OTHER; note = uracil
  modified_base 32..35: mod_base = OTHER; note = uracil
  modified_base 40..43: mod_base = OTHER; note = uracil
  modified_base 45: mod_base = OTHER; note = uracil
  modified_base 63..65: mod_base = OTHER; note = uracil
  modified_base 72..73: mod_base = OTHER; note = uracil
  modified_base 75..77: mod_base = OTHER; note = uracil
  modified_base 80..81: mod_base = OTHER; note = uracil
  modified_base 92..93: mod_base = OTHER; note = uracil
  modified_base 95..96: mod_base = OTHER; note = uracil
  modified_base 98: mod_base = OTHER; note = uracil
  modified_base 103: mod_base = OTHER; note = uracil
  modified_base 105: mod_base = OTHER; note = uracil
  modified_base 108: mod_base = OTHER; note = uracil
  modified_base 110: mod_base = OTHER; note = uracil
  modified_base 118: mod_base = OTHER; note = uracil
  modified_base 120: mod_base = OTHER; note = uracil
  modified_base 123: mod_base = OTHER; note = uracil
  modified_base 140..141: mod_base = OTHER; note = uracil
  modified_base 150..151: mod_base = OTHER; note = uracil
  modified_base 158..159: mod_base = OTHER; note = uracil
  modified_base 161: mod_base = OTHER; note = uracil
  modified_base 166: mod_base = OTHER; note = uracil
  modified_base 168: mod_base = OTHER; note = uracil
  modified_base 171..172: mod_base = OTHER; note = uracil
  modified_base 178: mod_base = OTHER; note = uracil
  modified_base 181..183: mod_base = OTHER; note = uracil
  modified_base 186..187: mod_base = OTHER; note = uracil
  modified_base 191..192: mod_base = OTHER; note = uracil
  modified_base 194: mod_base = OTHER; note = uracil
  modified_base 198..199: mod_base = OTHER; note = uracil
  modified_base 201..203: mod_base = OTHER; note = uracil
  modified_base 208: mod_base = OTHER; note = uracil
  modified_base 219: mod_base = OTHER; note = uracil
  modified_base 225: mod_base = OTHER; note = uracil
  modified_base 239: mod_base = OTHER; note = uracil
  modified_base 248: mod_base = OTHER; note = uracil
  modified_base 250: mod_base = OTHER; note = uracil
  modified_base 252..254: mod_base = OTHER; note = uracil
  modified_base 258..259: mod_base = OTHER; note = uracil
  modified_base 261..262: mod_base = OTHER; note = uracil
  modified_base 272..273: mod_base = OTHER; note = uracil
  modified_base 276: mod_base = OTHER; note = uracil
  modified_base 278..280: mod_base = OTHER; note = uracil
  modified_base 285..287: mod_base = OTHER; note = uracil
  modified_base 290..292: mod_base = OTHER; note = uracil
  modified_base 299: mod_base = OTHER; note = uracil
  modified_base 50: mod_base = m5c
  modified_base 68: mod_base = m5c
  modified_base 99: mod_base = m5c
  modified_base 111: mod_base = m5c
  modified_base 121: mod_base = m5c
  modified_base 146: mod_base = m5c
  modified_base 173: mod_base = m5c
  modified_base 179: mod_base = m5c
  modified_base 184: mod_base = m5c
  modified_base 209: mod_base = m5c
  modified_base 212: mod_base = m5c
  modified_base 216: mod_base = m5c
  modified_base 231: mod_base = m5c
  modified_base 268: mod_base = m5c
  modified_base 281: mod_base = m5c
  modified_base 288: mod_base = m5c
  variation 144: note = CpG site, residue is C if methylated or T(=U) if unmethylated
  variation 148: note = CpG site, residue is C if methylated or T(=U) if unmethylated
  variation 155: note = CpG site, residue is C if methylated or T(=U) if unmethylated
gaaatgggttattttaggtttgttttttaagttttagggttttttaggacgagtgaaaaaggttttgcggttttttttgtttgggggaatttttttttcgattatagtttcggtgggtttcgtagatgggaaagggtttttagygcgygtttagyggttataaattatttttcggggtcgtttcgttaggttttaaattttttagagtcgtcggtcggtttttattttaacgaggatttagatgggttatattttgttttttaaatgcgggtttgtttttcggatttcgtttagggggtt

SEQ ID NO: 127 - DNA, 300 bp, synthetic construct
  source 1..300: mol_type = other DNA
  modified_base 1: mod_base = OTHER; note = uracil
  modified_base 4..5: mod_base = OTHER; note = uracil
  modified_base 7: mod_base = OTHER; note = uracil
  modified_base 11..12: mod_base = OTHER; note = uracil
  modified_base 14..16: mod_base = OTHER; note = uracil
  modified_base 20..24: mod_base = OTHER; note = uracil
  modified_base 26: mod_base = OTHER; note = uracil
  modified_base 28: mod_base = OTHER; note = uracil
  modified_base 30: mod_base = OTHER; note = uracil
  modified_base 33..34: mod_base = OTHER; note = uracil
  modified_base 37: mod_base = OTHER; note = uracil
  modified_base 39: mod_base = OTHER; note = uracil
  modified_base 43: mod_base = OTHER; note = uracil
  modified_base 46..47: mod_base = OTHER; note = uracil
  modified_base 49: mod_base = OTHER; note = uracil
  modified_base 55: mod_base = OTHER; note = uracil
  modified_base 57..58: mod_base = OTHER; note = uracil
  modified_base 66: mod_base = OTHER; note = uracil
  modified_base 82: mod_base = OTHER; note = uracil
  modified_base 84..86: mod_base = OTHER; note = uracil
  modified_base 93..95: mod_base = OTHER; note = uracil
  modified_base 98..99: mod_base = OTHER; note = uracil
  modified_base 102..103: mod_base = OTHER; note = uracil
  modified_base 105..106: mod_base = OTHER; note = uracil
  modified_base 109: mod_base = OTHER; note = uracil
  modified_base 116: mod_base = OTHER; note = uracil
  modified_base 125: mod_base = OTHER; note = uracil
  modified_base 128: mod_base = OTHER; note = uracil
  modified_base 132..134: mod_base = OTHER; note = uracil
  modified_base 136..137: mod_base = OTHER; note = uracil
  modified_base 141..143: mod_base = OTHER; note = uracil
  modified_base 145..146: mod_base = OTHER; note = uracil
  modified_base 148..149: mod_base = OTHER; note = uracil
  modified_base 153..155: mod_base = OTHER; note = uracil
  modified_base 159..160: mod_base = OTHER; note = uracil
  modified_base 164..165: mod_base = OTHER; note = uracil
  modified_base 167..169: mod_base = OTHER; note = uracil
  modified_base 171..175: mod_base = OTHER; note = uracil
  modified_base 183..184: mod_base = OTHER; note = uracil
  modified_base 192: mod_base = OTHER; note = uracil
  modified_base 194..195: mod_base = OTHER; note = uracil
  modified_base 200: mod_base = OTHER; note = uracil
  modified_base 206..207: mod_base = OTHER; note = uracil
  modified_base 211..212: mod_base = OTHER; note = uracil
  modified_base 214: mod_base = OTHER; note = uracil
  modified_base 220..221: mod_base = OTHER; note = uracil
  modified_base 223: mod_base = OTHER; note = uracil
  modified_base 225..226: mod_base = OTHER; note = uracil
  modified_base 228..230: mod_base = OTHER; note = uracil
  modified_base 232: mod_base = OTHER; note = uracil
  modified_base 234: mod_base = OTHER; note = uracil
  modified_base 238..239: mod_base = OTHER; note = uracil
  modified_base 241..242: mod_base = OTHER; note = uracil
  modified_base 244: mod_base = OTHER; note = uracil
  modified_base 247: mod_base = OTHER; note = uracil
  modified_base 254: mod_base = OTHER; note = uracil
  modified_base 258: mod_base = OTHER; note = uracil
  modified_base 264..265: mod_base = OTHER; note = uracil
  modified_base 268: mod_base = OTHER; note = uracil
  modified_base 270..271: mod_base = OTHER; note = uracil
  modified_base 274..276: mod_base = OTHER; note = uracil
  modified_base 280: mod_base = OTHER; note = uracil
  modified_base 282..283: mod_base = OTHER; note = uracil
  modified_base 286: mod_base = OTHER; note = uracil
  modified_base 289: mod_base = OTHER; note = uracil
  modified_base 292..293: mod_base = OTHER; note = uracil
  modified_base 295: mod_base = OTHER; note = uracil
  modified_base 298: mod_base = OTHER; note = uracil
  modified_base 35: mod_base = m5c
  modified_base 50: mod_base = m5c
  modified_base 185: mod_base = m5c
  modified_base 255: mod_base = m5c
  variation 150: note = CpG site, residue is C if methylated or T(=U) if unmethylated
tatttataaattttttaggtttttttatttttttcgtatagtttgttttcggtgttttagaaagattggaaatgaggtgagtttttttggatttttgtttgttatttgtaaatattatgtggtgttatttgtttttttgttttttttttygttttaggttaatttttttatttttttaattgttcggggatttttattatttaaatttttttattggtatttttttttttatataagtttttttagttgtttttcgtttttaattaatattttttttggttttagttattgttattttat

SEQ ID NO: 128 - DNA, 300 bp, synthetic construct
  source 1..300: mol_type = other DNA
  modified_base 10: mod_base = OTHER; note = uracil
  modified_base 16: mod_base = OTHER; note = uracil
  modified_base 22..23: mod_base = OTHER; note = uracil
  modified_base 52: mod_base = OTHER; note = uracil
  modified_base 55: mod_base = OTHER; note = uracil
  modified_base 64: mod_base = OTHER; note = uracil
  modified_base 84..85: mod_base = OTHER; note = uracil
  modified_base 112..114: mod_base = OTHER; note = uracil
  modified_base 119: mod_base = OTHER; note = uracil
  modified_base 143..144: mod_base = OTHER; note = uracil
  modified_base 162: mod_base = OTHER; note = uracil
  modified_base 170: mod_base = OTHER; note = uracil
  modified_base 177: mod_base = OTHER; note = uracil
  modified_base 179..180: mod_base = OTHER; note = uracil
  modified_base 182: mod_base = OTHER; note = uracil
  modified_base 193: mod_base = OTHER; note = uracil
  modified_base 200: mod_base = OTHER; note = uracil
  modified_base 204: mod_base = OTHER; note = uracil
  modified_base 211..212: mod_base = OTHER; note = uracil
  modified_base 220: mod_base = OTHER; note = uracil
  modified_base 222: mod_base = OTHER; note = uracil
  modified_base 224..225: mod_base = OTHER; note = uracil
  modified_base 227: mod_base = OTHER; note = uracil
  modified_base 232..233: mod_base = OTHER; note = uracil
  modified_base 237: mod_base = OTHER; note = uracil
  modified_base 241: mod_base = OTHER; note = uracil
  modified_base 247: mod_base = OTHER; note = uracil
  modified_base 249: mod_base = OTHER; note = uracil
  modified_base 256: mod_base = OTHER; note = uracil
  modified_base 260: mod_base = OTHER; note = uracil
  modified_base 282..283: mod_base = OTHER; note = uracil
  modified_base 45: mod_base = m5c
  modified_base 115: mod_base = m5c
  modified_base 250: mod_base = m5c
  modified_base 265: mod_base = m5c
  variation 150: note = CpG site, residue is C if methylated or T(=U) if unmethylated
atgaagtggtagtagttggagttagggaaggtgttggttaaagacggaaaatagttgaggaggtttgtgtgggaggagaggtattagtggaaaggtttaagtaatggagattttcgggtaattaagggggtgggaggattggtttgggaygggaggagggataggagggtaagtagtattatatgatatttgtaggtggtaggtagggatttaagggagtttattttatttttagtttttttggagtatcggaggtagattgtgcgggaagagtgagggggtttgggaggtttgtggatg

SEQ ID NO: 129 - DNA, 300 bp, synthetic construct
  source 1..300: mol_type = other DNA
  modified_base 1: mod_base = OTHER; note = uracil
  modified_base 5..7: mod_base = OTHER; note = uracil
  modified_base 12: mod_base = OTHER; note = uracil
  modified_base 15..16: mod_base = OTHER; note = uracil
  modified_base 21..25: mod_base = OTHER; note = uracil
  modified_base 29..32: mod_base = OTHER; note = uracil
  modified_base 36: mod_base = OTHER; note = uracil
  modified_base 44: mod_base = OTHER; note = uracil
  modified_base 46: mod_base = OTHER; note = uracil
  modified_base 50: mod_base = OTHER; note = uracil
  modified_base 52: mod_base = OTHER; note = uracil
  modified_base 54: mod_base = OTHER; note = uracil
  modified_base 57..58: mod_base = OTHER; note = uracil
  modified_base 60: mod_base = OTHER; note = uracil
  modified_base 63..67: mod_base = OTHER; note = uracil
  modified_base 75: mod_base = OTHER; note = uracil
  modified_base 82..84: mod_base = OTHER; note = uracil
  modified_base 86: mod_base = OTHER; note = uracil
  modified_base 98: mod_base = OTHER; note = uracil
  modified_base 100: mod_base = OTHER; note = uracil
  modified_base 103: mod_base = OTHER; note = uracil
  modified_base 108..109: mod_base = OTHER; note = uracil
  modified_base 112..114: mod_base = OTHER; note = uracil
  modified_base 116..117: mod_base = OTHER; note = uracil
  modified_base 122: mod_base = OTHER; note = uracil
  modified_base 125: mod_base = OTHER; note = uracil
  modified_base 132: mod_base = OTHER; note = uracil
  modified_base 139: mod_base = OTHER; note = uracil
  modified_base 141: mod_base = OTHER; note = uracil
  modified_base 144..145: mod_base = OTHER; note = uracil
  modified_base 149: mod_base = OTHER; note = uracil
  modified_base 154: mod_base = OTHER; note = uracil
  modified_base 160: mod_base = OTHER; note = uracil
  modified_base 162: mod_base = OTHER; note = uracil
  modified_base 167: mod_base = OTHER; note = uracil
  modified_base 173..174: mod_base = OTHER; note = uracil
  modified_base 176: mod_base = OTHER; note = uracil
  modified_base 178: mod_base = OTHER; note = uracil
  modified_base 192: mod_base = OTHER; note = uracil
  modified_base 212: mod_base = OTHER; note = uracil
  modified_base 214: mod_base = OTHER; note = uracil
  modified_base 225: mod_base = OTHER; note = uracil
  modified_base 248: mod_base = OTHER; note = uracil
  modified_base 253: mod_base = OTHER; note = uracil
  modified_base 260: mod_base = OTHER; note = uracil
  modified_base 262..263: mod_base = OTHER; note = uracil
  modified_base 265: mod_base = OTHER; note = uracil
  modified_base 273: mod_base = OTHER; note = uracil
  modified_base 277..279: mod_base = OTHER; note = uracil
  modified_base 289: mod_base = OTHER; note = uracil
  modified_base 293: mod_base = OTHER; note = uracil
  modified_base 295: mod_base = OTHER; note = uracil
  modified_base 297: mod_base = OTHER; note = uracil
  modified_base 61: mod_base = m5c
  modified_base 89: mod_base = m5c
  modified_base 91: mod_base = m5c
  modified_base 93: mod_base = m5c
  modified_base 106: mod_base = m5c
  modified_base 118: mod_base = m5c
  modified_base 142: mod_base = m5c
  modified_base 155: mod_base = m5c
  modified_base 157: mod_base = m5c
  modified_base 179: mod_base = m5c
  modified_base 185: mod_base = m5c
  modified_base 195: mod_base = m5c
  modified_base 208: mod_base = m5c
  modified_base 219: mod_base = m5c
  modified_base 228: mod_base = m5c
  modified_base 286: mod_base = m5c
  variation 137: note = CpG site, residue is C if methylated or T(=U) if unmethylated
  variation 165: note = CpG site, residue is C if methylated or T(=U) if unmethylated
tttttttaggattgttttggttttttggttttagtttggaggatttttgtttatttttttcgtttttaggtgagttgagaatttattgcgcgcgggattttgttgcgtttgttttttcgggttgtagagggtaggaygtatcgttaggtaaggtcgcggttttgygttgatgttatttcgggagcgggtggttgcgggggaggagggcgagtattggacgggggtagcggagtgtagggtgtgagatttaaatagagggttttattggagggtttgtttagaaggcggtagttatattgg

SEQ ID NO: 130 - DNA, 300 bp, synthetic construct
  source 1..300: mol_type = other DNA
  modified_base 1..2: mod_base = OTHER; note = uracil
  modified_base 10: mod_base = OTHER; note = uracil
  modified_base 13: mod_base = OTHER; note = uracil
  modified_base 16..17: mod_base = OTHER; note = uracil
  modified_base 20: mod_base = OTHER; note = uracil
  modified_base 25: mod_base = OTHER; note = uracil
  modified_base 29..31: mod_base = OTHER; note = uracil
  modified_base 33..34: mod_base = OTHER; note = uracil
  modified_base 42..44: mod_base = OTHER; note = uracil
  modified_base 46: mod_base = OTHER; note = uracil
  modified_base 56: mod_base = OTHER; note = uracil
  modified_base 58: mod_base = OTHER; note = uracil
  modified_base 60: mod_base = OTHER; note = uracil
  modified_base 62..64: mod_base = OTHER; note = uracil
  modified_base 67: mod_base = OTHER; note = uracil
  modified_base 69: mod_base = OTHER; note = uracil
  modified_base 71: mod_base = OTHER; note = uracil
  modified_base 74: mod_base = OTHER; note = uracil
  modified_base 77..80: mod_base = OTHER; note = uracil
  modified_base 84..85: mod_base = OTHER; note = uracil
  modified_base 90: mod_base = OTHER; note = uracil
  modified_base 94..96: mod_base = OTHER; note = uracil
  modified_base 98..99: mod_base = OTHER; note = uracil
  modified_base 101..104: mod_base = OTHER; note = uracil
  modified_base 107: mod_base = OTHER; note = uracil
  modified_base 110..111: mod_base = OTHER; note = uracil
  modified_base 113..114: mod_base = OTHER; note = uracil
  modified_base 117: mod_base = OTHER; note = uracil
  modified_base 119..120: mod_base = OTHER; note = uracil
  modified_base 129: mod_base = OTHER; note = uracil
  modified_base 132: mod_base = OTHER; note = uracil
  modified_base 137: mod_base = OTHER; note = uracil
  modified_base 142: mod_base = OTHER; note = uracil
  modified_base 148..149: mod_base = OTHER; note = uracil
  modified_base 153..154: mod_base = OTHER; note = uracil
  modified_base 166..167: mod_base = OTHER; note = uracil
  modified_base 170..172: mod_base = OTHER; note = uracil
  modified_base 174: mod_base = OTHER; note = uracil
  modified_base 177: mod_base = OTHER; note = uracil
  modified_base 180..181: mod_base = OTHER; note = uracil
  modified_base 190: mod_base = OTHER; note = uracil
  modified_base 196: mod_base = OTHER; note = uracil
  modified_base 199: mod_base = OTHER; note = uracil
  modified_base 205..206: mod_base = OTHER; note = uracil
  modified_base 213: mod_base = OTHER; note = uracil
  modified_base 222: mod_base = OTHER; note = uracil
  modified_base 224: mod_base = OTHER; note = uracil
  modified_base 227: mod_base = OTHER; note = uracil
  modified_base 229: mod_base = OTHER; note = uracil
  modified_base 231..232: mod_base = OTHER; note = uracil
  modified_base 252: mod_base = OTHER; note = uracil
  modified_base 259..260: mod_base = OTHER; note = uracil
  modified_base 262..263: mod_base = OTHER; note = uracil
  modified_base 267: mod_base = OTHER; note = uracil
  modified_base 273..274: mod_base = OTHER; note = uracil
  modified_base 281..282: mod_base = OTHER; note = uracil
  modified_base 287: mod_base = OTHER; note = uracil
  modified_base 291..292: mod_base = OTHER; note = uracil
  modified_base 14: mod_base = m5c
  modified_base 72: mod_base = m5c
  modified_base 81: mod_base = m5c
  modified_base 92: mod_base = m5c
  modified_base 105: mod_base = m5c
  modified_base 115: mod_base = m5c
  modified_base 121: mod_base = m5c
  modified_base 143: mod_base = m5c
  modified_base 145: mod_base = m5c
  modified_base 158: mod_base = m5c
  modified_base 182: mod_base = m5c
  modified_base 194: mod_base = m5c
  modified_base 207: mod_base = m5c
  modified_base 209: mod_base = m5c
  modified_base 211: mod_base = m5c
  modified_base 239: mod_base = m5c
  variation 135: note = CpG site, residue is C if methylated or T(=U) if unmethylated
  variation 163: note = CpG site, residue is C if methylated or T(=U) if unmethylated
ttagtgtgattgtcgttttttgggtaagttttttagtggagttttttgtttagattttatattttatatttcgttgttttcgtttagtgttcgtttttttttttcgtagttattcgttttcggagtggtattagygtagagtcgcggttttgtttggcggtgygttttgttttttgtagttcgggagggtaggcgtagtagagtttcgcgcgtagtgggtttttagtttatttgggggcggaggaagtgagtaagagttttttagattggggttagggggttaaggtagttttgggaaag

SEQ ID NO: 131 - DNA, 300 bp, synthetic construct
  source 1..300: mol_type = other DNA
  modified_base 9: mod_base = OTHER; note = uracil
  modified_base 11: mod_base = OTHER; note = uracil
  modified_base 13: mod_base = OTHER; note = uracil
  modified_base 15..16: mod_base = OTHER; note = uracil
  modified_base 19..20: mod_base = OTHER; note = uracil
  modified_base 22: mod_base = OTHER; note = uracil
  modified_base 27..28: mod_base = OTHER; note = uracil
  modified_base 30..33: mod_base = OTHER; note = uracil
  modified_base 36: mod_base = OTHER; note = uracil
  modified_base 38..40: mod_base = OTHER; note = uracil
  modified_base 42: mod_base = OTHER; note = uracil
  modified_base 44: mod_base = OTHER; note = uracil
  modified_base 46..47: mod_base = OTHER; note = uracil
  modified_base 54: mod_base = OTHER; note = uracil
  modified_base 58: mod_base = OTHER; note = uracil
  modified_base 60..61: mod_base = OTHER; note = uracil
  modified_base 64: mod_base = OTHER; note = uracil
  modified_base 66..70: mod_base = OTHER; note = uracil
  modified_base 77..78: mod_base = OTHER; note = uracil
  modified_base 84..86: mod_base = OTHER; note = uracil
  modified_base 88..89: mod_base = OTHER; note = uracil
  modified_base 93..94: mod_base = OTHER; note = uracil
  modified_base 96: mod_base = OTHER; note = uracil
  modified_base 103: mod_base = OTHER; note = uracil
  modified_base 106: mod_base = OTHER; note = uracil
  modified_base 110: mod_base = OTHER; note = uracil
  modified_base 112: mod_base = OTHER; note = uracil
  modified_base 116: mod_base = OTHER; note = uracil
  modified_base 118: mod_base = OTHER; note = uracil
  modified_base 120: mod_base = OTHER; note = uracil
  modified_base 123..124: mod_base = OTHER; note = uracil
  modified_base 126: mod_base = OTHER; note = uracil
  modified_base 132: mod_base = OTHER; note = uracil
  modified_base 134: mod_base = OTHER; note = uracil
  modified_base 136..138: mod_base = OTHER; note = uracil
  modified_base 140..144: mod_base = OTHER; note = uracil
  modified_base 146: mod_base = OTHER; note = uracil
  modified_base 148..150: mod_base = OTHER; note = uracil
  modified_base 160: mod_base = OTHER; note = uracil
  modified_base 164: mod_base = OTHER; note = uracil
  modified_base 168: mod_base = OTHER; note = uracil
  modified_base 170..171: mod_base = OTHER; note = uracil
  modified_base 176: mod_base = OTHER; note = uracil
  modified_base 180: mod_base = OTHER; note = uracil
  modified_base 182: mod_base = OTHER; note = uracil
  modified_base 185..187: mod_base = OTHER; note = uracil
  modified_base 190: mod_base = OTHER; note = uracil
  modified_base 192: mod_base = OTHER; note = uracil
  modified_base 195..196: mod_base = OTHER; note = uracil
  modified_base 199..201: mod_base = OTHER; note = uracil
  modified_base 208: mod_base = OTHER; note = uracil
  modified_base 222: mod_base = OTHER; note = uracil
  modified_base 224: mod_base = OTHER; note = uracil
  modified_base 227: mod_base = OTHER; note = uracil
  modified_base 230: mod_base = OTHER; note = uracil
  modified_base 235: mod_base = OTHER; note = uracil
  modified_base 237..238: mod_base = OTHER; note = uracil
  modified_base 242: mod_base = OTHER; note = uracil
  modified_base 245..246: mod_base = OTHER; note = uracil
  modified_base 249: mod_base = OTHER; note = uracil
  modified_base 255: mod_base = OTHER; note = uracil
  modified_base 258..259: mod_base = OTHER; note = uracil
  modified_base 262: mod_base = OTHER; note = uracil
  modified_base 264..268: mod_base = OTHER; note = uracil
  modified_base 274: mod_base = OTHER; note = uracil
  modified_base 276..279: mod_base = OTHER; note = uracil
  modified_base 281..282: mod_base = OTHER; note = uracil
  modified_base 288..291: mod_base = OTHER; note = uracil
  modified_base 293: mod_base = OTHER; note = uracil
  modified_base 296: mod_base = OTHER; note = uracil
  modified_base 300: mod_base = OTHER; note = uracil
  modified_base 17: mod_base = m5c
  modified_base 34: mod_base = m5c
  modified_base 51: mod_base = m5c
  modified_base 72: mod_base = m5c
  modified_base 79: mod_base = m5c
  modified_base 151: mod_base = m5c
  modified_base 183: mod_base = m5c
  modified_base 188: mod_base = m5c
  modified_base 193: mod_base = m5c
  modified_base 202: mod_base = m5c
  modified_base 209: mod_base = m5c
  modified_base 213: mod_base = m5c
  modified_base 231: mod_base = m5c
  modified_base 240: mod_base = m5c
  modified_base 247: mod_base = m5c
  modified_base 253: mod_base = m5c
  modified_base 294: mod_base = m5c
  modified_base 298: mod_base = m5c
  variation 104: note = CpG site, residue is C if methylated or T(=U) if unmethylated
  variation 113: note = CpG site, residue is C if methylated or T(=U) if unmethylated
  variation 104: note = CpG site, residue is C if methylated or T(=U) if unmethylated
  variation 113: note = CpG site, residue is C if methylated or T(=U) if unmethylated
  variation 197: note = CpG site, residue is C if methylated or T(=U) if unmethylated
tttagggtttttttttcgtttttttttttttttcgttttttttttttttgcggttgattttagttttttttcggtgttcgtaattttttttttttttttttgtygtagttttygttttttttttatagggttttttttttttttttttttcgtggttgttagatttttttttggatttttttcgtttcgtatcgttygtttcggatgtcgagcgtggtagattttgtagtcgggtttttcgttgttcgttggcgttgtttatatttttttgggtttttttttaaggtttttttcgttcgt

SEQ ID NO: 132 - DNA, 300 bp, synthetic construct
  source 1..300: mol_type = other DNA
  modified_base 15..16: mod_base = OTHER; note = uracil
  modified_base 28..30: mod_base = OTHER; note = uracil
  modified_base 44: mod_base = OTHER; note = uracil
  modified_base 49..50: mod_base = OTHER; note = uracil
  modified_base 57: mod_base = OTHER; note = uracil
  modified_base 67..68: mod_base = OTHER; note = uracil
  modified_base 72: mod_base = OTHER; note = uracil
  modified_base 75: mod_base = OTHER; note = uracil
  modified_base 81: mod_base = OTHER; note = uracil
  modified_base 84..85: mod_base = OTHER; note = uracil
  modified_base 89: mod_base = OTHER; note = uracil
  modified_base 94: mod_base = OTHER; note = uracil
  modified_base 97: mod_base = OTHER; note = uracil
  modified_base 127..128: mod_base = OTHER; note = uracil
  modified_base 139: mod_base = OTHER; note = uracil
  modified_base 143: mod_base = OTHER; note = uracil
  modified_base 146..147: mod_base = OTHER; note = uracil
  modified_base 171..173: mod_base = OTHER; note = uracil
  modified_base 193: mod_base = OTHER; note = uracil
  modified_base 199: mod_base = OTHER; note = uracil
  modified_base 225: mod_base = OTHER; note = uracil
  modified_base 227: mod_base = OTHER; note = uracil
  modified_base 238: mod_base = OTHER; note = uracil
  modified_base 245: mod_base = OTHER; note = uracil
  modified_base 248: mod_base = OTHER; note = uracil
  modified_base 251: mod_base = OTHER; note = uracil
  modified_base 294..296: mod_base = OTHER; note = uracil
  modified_base 2: mod_base = m5c
  modified_base 6: mod_base = m5c
  modified_base 47: mod_base = m5c
  modified_base 53: mod_base = m5c
  modified_base 60: mod_base = m5c
  modified_base 69: mod_base = m5c
  modified_base 87: mod_base = m5c
  modified_base 91: mod_base = m5c
  modified_base 98: mod_base = m5c
  modified_base 107: mod_base = m5c
  modified_base 112: mod_base = m5c
  modified_base 117: mod_base = m5c
  modified_base 149: mod_base = m5c
  modified_base 221: mod_base = m5c
  modified_base 228: mod_base = m5c
  modified_base 249: mod_base = m5c
  modified_base 266: mod_base = m5c
  modified_base 283: mod_base = m5c
  variation 103: note = CpG site, residue is C if methylated or T(=U) if unmethylated
  variation 187: note = CpG site, residue is C if methylated or T(=U) if unmethylated
  variation 196: note = CpG site, residue is C if methylated or T(=U) if unmethylated
gcgagcggaggggattttggaggggagtttaagggggtgtaggtagcgttagcgggtagcgaggagttcggttgtagagtttattacgttcggtattcggggygggcggtgcggggcggagaaagtttaggagaaagtttgataattacggggagagggggagggagagattttgtggaagagagayggagattgyggtaaaaagaggaaaggagggttacgggtatcgagggggagttggagttagtcgtaaggagagagggagcgggggaggaaaagaggcgggagagagattttaaa

SEQ ID NO: 133 - DNA, 300 bp, synthetic construct
  source 1..300: mol_type = other DNA
  modified_base 6..7: mod_base = OTHER; note = uracil
  modified_base 9: mod_base = OTHER; note = uracil
  modified_base 16: mod_base = OTHER; note = uracil
  modified_base 21: mod_base = OTHER; note = uracil
  modified_base 30: mod_base = OTHER; note = uracil
  modified_base 33..35: mod_base = OTHER; note = uracil
  modified_base 38..39: mod_base = OTHER; note = uracil
  modified_base 44: mod_base = OTHER; note = uracil
  modified_base 47..48: mod_base = OTHER; note = uracil
  modified_base 50..51: mod_base = OTHER; note = uracil
  modified_base 59: mod_base = OTHER; note = uracil
  modified_base 61: mod_base = OTHER; note = uracil
  modified_base 67: mod_base = OTHER; note = uracil
  modified_base 69..70: mod_base = OTHER; note = uracil
  modified_base 73: mod_base = OTHER; note = uracil
  modified_base 81: mod_base = OTHER; note = uracil
  modified_base 84..85: mod_base = OTHER; note = uracil
  modified_base 87: mod_base = OTHER; note = uracil
  modified_base 90: mod_base = OTHER; note = uracil
  modified_base 93: mod_base = OTHER; note = uracil
  modified_base 100..101: mod_base = OTHER; note = uracil
  modified_base 105: mod_base = OTHER; note = uracil
  modified_base 107: mod_base = OTHER; note = uracil
  modified_base 112: mod_base = OTHER; note = uracil
  modified_base 117: mod_base = OTHER; note = uracil
  modified_base 126: mod_base = OTHER; note = uracil
  modified_base 128: mod_base = OTHER; note = uracil
  modified_base 134: mod_base = OTHER; note = uracil
  modified_base 138: mod_base = OTHER; note = uracil
  modified_base 143..144: mod_base = OTHER; note = uracil
  modified_base 147..148: mod_base = OTHER; note = uracil
  modified_base 151..152: mod_base = OTHER; note = uracil
  modified_base 155: mod_base = OTHER; note = uracil
  modified_base 160..161: mod_base = OTHER; note = uracil
  modified_base 167: mod_base = OTHER; note = uracil
  modified_base 170: mod_base = OTHER; note = uracil
  modified_base 173: mod_base = OTHER; note = uracil
  modified_base 175: mod_base = OTHER; note = uracil
  modified_base 179: mod_base = OTHER; note = uracil
  modified_base 185: mod_base = OTHER; note = uracil
  modified_base 187: mod_base = OTHER; note = uracil
  modified_base 191: mod_base = OTHER; note = uracil
  modified_base 200..201: mod_base = OTHER; note = uracil
  modified_base 204: mod_base = OTHER; note = uracil
  modified_base 208: mod_base = OTHER; note = uracil
  modified_base 210: mod_base = OTHER; note = uracil
  modified_base 213: mod_base = OTHER; note = uracil
  modified_base 216: mod_base = OTHER; note = uracil
  modified_base 221..222: mod_base = OTHER; note = uracil
  modified_base 230: mod_base = OTHER; note = uracil
  modified_base 233: mod_base = OTHER; note = uracil
  modified_base 239..240: mod_base = OTHER; note = uracil
  modified_base 244..245: mod_base = OTHER; note = uracil
  modified_base 248: mod_base = OTHER; note = uracil
  modified_base 251..252: mod_base = OTHER; note = uracil
  modified_base 256..260: mod_base = OTHER; note = uracil
  modified_base 262: mod_base = OTHER; note = uracil
  modified_base 268: mod_base = OTHER; note = uracil
  modified_base 275..276: mod_base = OTHER; note = uracil
  modified_base 279: mod_base = OTHER; note = uracil
  modified_base 289..290: mod_base = OTHER; note = uracil
  modified_base 292..293: mod_base = OTHER; note = uracil
  modified_base 295..296: mod_base = OTHER; note = uracil
  modified_base 299..300: mod_base = OTHER; note = uracil
  modified_base 135: mod_base = m5c
  modified_base 176: mod_base = m5c
  modified_base 198: mod_base = m5c
  modified_base 234: mod_base = m5c
  modified_base 263: mod_base = m5c
  modified_base 269: mod_base = m5c
  modified_base 282: mod_base = m5c
  modified_base 297: mod_base = m5c
  variation 149: note = CpG site, residue is C if methylated or T(=U) if unmethylated
gagggttatagtaaattggataagtttttttgtttagtttaggttgttatttgtaggttatttgggttttagttatgtggttgttttttttgttgggtgttttattttgggtagtgttgtggttgtttagggatcggtagagtttgttygttagtaatgtttttgtttttattatcggttgtgatttaggttttgggcgttttttggtattgtagttggattagagaggttttcgagttttggttagttgtttgatttttttcggggtcgaggatttgtagcgggtggttttttttcgtt

SEQ ID NO: 134 - DNA, 300 bp, synthetic construct
  source 1..300: mol_type = other DNA
  modified_base 12..13: mod_base = OTHER; note = uracil
  modified_base 15..16: mod_base = OTHER; note = uracil
  modified_base 19: mod_base = OTHER; note = uracil
  modified_base 22: mod_base = OTHER; note = uracil
  modified_base 27..28: mod_base = OTHER; note = uracil
  modified_base 33..35: mod_base = OTHER; note = uracil
  modified_base 46: mod_base = OTHER; note = uracil
  modified_base 50: mod_base = OTHER; note = uracil
  modified_base 53: mod_base = OTHER; note = uracil
  modified_base 57..58: mod_base = OTHER; note = uracil
  modified_base 63: mod_base = OTHER; note = uracil
  modified_base 71..72: mod_base = OTHER; note = uracil
  modified_base 74: mod_base = OTHER; note = uracil
  modified_base 76: mod_base = OTHER; note = uracil
  modified_base 81..82: mod_base = OTHER; note = uracil
  modified_base 85: mod_base = OTHER; note = uracil
  modified_base 88: mod_base = OTHER; note = uracil
  modified_base 93..94: mod_base = OTHER; note = uracil
  modified_base 103..105: mod_base = OTHER; note = uracil
  modified_base 110..111: mod_base = OTHER; note = uracil
  modified_base 117: mod_base = OTHER; note = uracil
  modified_base 119: mod_base = OTHER; note = uracil
  modified_base 122: mod_base = OTHER; note = uracil
  modified_base 135: mod_base = OTHER; note = uracil
  modified_base 141: mod_base = OTHER; note = uracil
  modified_base 146: mod_base = OTHER; note = uracil
  modified_base 154: mod_base = OTHER; note = uracil
  modified_base 158: mod_base = OTHER; note = uracil
  modified_base 160: mod_base = OTHER; note = uracil
  modified_base 163: mod_base = OTHER; note = uracil
  modified_base 168..170: mod_base = OTHER; note = uracil
  modified_base 175: mod_base = OTHER; note = uracil
  modified_base 178..179: mod_base = OTHER; note = uracil
  modified_base 181: mod_base = OTHER; note = uracil
  modified_base 184: mod_base = OTHER; note = uracil
  modified_base 186: mod_base = OTHER; note = uracil
  modified_base 189..191: mod_base = OTHER; note = uracil
  modified_base 201: mod_base = OTHER; note = uracil
  modified_base 203..205: mod_base = OTHER; note = uracil
  modified_base 208: mod_base = OTHER; note = uracil
  modified_base 217: mod_base = OTHER; note = uracil
  modified_base 220..221: mod_base = OTHER; note = uracil
  modified_base 223: mod_base = OTHER; note = uracil
  modified_base 228: mod_base = OTHER; note = uracil
  modified_base 234..236: mod_base = OTHER; note = uracil
  modified_base 243..244: mod_base = OTHER; note = uracil
  modified_base 247: mod_base = OTHER; note = uracil
  modified_base 254: mod_base = OTHER; note = uracil
  modified_base 257..258: mod_base = OTHER; note = uracil
  modified_base 263: mod_base = OTHER; note = uracil
  modified_base 268: mod_base = OTHER; note = uracil
  modified_base 276: mod_base = OTHER; note = uracil
  modified_base 281..282: mod_base = OTHER; note = uracil
  modified_base 289: mod_base = OTHER; note = uracil
  modified_base 295..297: mod_base = OTHER; note = uracil
  modified_base 299: mod_base = OTHER; note = uracil
  modified_base 2: mod_base = m5c
  modified_base 17: mod_base = m5c
  modified_base 30: mod_base = m5c
  modified_base 36: mod_base = m5c
  modified_base 65: mod_base = m5c
  modified_base 101: mod_base = m5c
  modified_base 123: mod_base = m5c
  modified_base 164: mod_base = m5c
  variation 150: note = CpG site, residue is C if methylated or T(=U) if unmethylated
gcgggaggaggttattcgttgtaggttttcggtttcggagggggttaggtagttggttaggattcggaagtttttttggtttagttgtagtgttagaaggcgtttaaagtttgagttatagtcggtgatgaagataaaggtattgttggygggtaggttttgtcggtttttgagtaattatagtattgtttagagtaaggtatttagtagaagaggtagttatatagttggagtttaagtgatttataggtggtagtttaggttgggtagaaaaatttgtttagtttattgtggttttta

SEQ ID NO: 135 - DNA, 300 bp, synthetic construct
  source 1..300: mol_type = other DNA
  modified_base 4: mod_base = OTHER; note = uracil
  modified_base 8: mod_base = OTHER; note = uracil
  modified_base 11: mod_base = OTHER; note = uracil
  modified_base 23..25: mod_base = OTHER; note = uracil
  modified_base 32..33: mod_base = OTHER; note = uracil
  modified_base 39: mod_base = OTHER; note = uracil
  modified_base 47: mod_base = OTHER; note = uracil
  modified_base 56: mod_base = OTHER; note = uracil
  modified_base 61: mod_base = OTHER; note = uracil
  modified_base 66: mod_base = OTHER; note = uracil
  modified_base 73: mod_base = OTHER; note = uracil
  modified_base 76: mod_base = OTHER; note = uracil
  modified_base 83: mod_base = OTHER; note = uracil
  modified_base 98: mod_base = OTHER; note = uracil
  modified_base 103..105: mod_base = OTHER; note = uracil
  modified_base 107: mod_base = OTHER; note = uracil
  modified_base 120: mod_base = OTHER; note = uracil
  modified_base 128: mod_base = OTHER; note = uracil
  modified_base 131..132: mod_base = OTHER; note = uracil
  modified_base 139: mod_base = OTHER; note = uracil
  modified_base 143..144: mod_base = OTHER; note = uracil
  modified_base 146: mod_base = OTHER; note = uracil
  modified_base 164: mod_base = OTHER; note = uracil
  modified_base 171: mod_base = OTHER; note = uracil
  modified_base 173: mod_base = OTHER; note = uracil
  modified_base 175: mod_base = OTHER; note = uracil
  modified_base 180: mod_base = OTHER; note = uracil
  modified_base 185: mod_base = OTHER; note = uracil
  modified_base 191: mod_base = OTHER; note = uracil
  modified_base 194: mod_base = OTHER; note = uracil
  modified_base 203: mod_base = OTHER; note = uracil
  modified_base 217: mod_base = OTHER; note = uracil
  modified_base 223: mod_base = OTHER; note = uracil
  modified_base 231: mod_base = OTHER; note = uracil
  modified_base 233..234: mod_base = OTHER; note = uracil
  modified_base 236: mod_base = OTHER; note = uracil
  modified_base 238: mod_base = OTHER; note = uracil
  modified_base 244..246: mod_base = OTHER; note = uracil
  modified_base 251: mod_base = OTHER; note = uracil
  modified_base 253..254: mod_base = OTHER; note = uracil
  modified_base 256..257: mod_base = OTHER; note = uracil
  modified_base 285: mod_base = OTHER; note = uracil
  modified_base 294: mod_base = OTHER; note = uracil
  modified_base 133: mod_base = m5c
  modified_base 176: mod_base = m5c
  modified_base 260: mod_base = m5c
  variation 149: note = CpG site, residue is C if methylated or T(=U) if unmethylated
  variation 153: note = CpG site, residue is C if methylated or T(=U) if unmethylated
gttttggttttatttttttttttttaaaatgttatttttatttgtttttagagtttagaatatgttaaagagtttttttaagtagtaggtggttttatagagtttatagagaaggaaaattaaatattatttcggatgtagtttattaygatygtggaggagttagattatttttcgggttttgttgtgtttgtttgtgaaataggaaagggagaattgaggtaatgagttattttatttgggtttaaagtattatttacgttgaatatggagaaaatgtgaagtaagagttttttttta

SEQ ID NO: 136 - DNA, 300 bp, synthetic construct
  source 1..300: mol_type = other DNA
  modified_base 11: mod_base = OTHER; note = uracil
  modified_base 13: mod_base = OTHER; note = uracil
  modified_base 17: mod_base = OTHER; note = uracil
  modified_base 20: mod_base = OTHER; note = uracil
  modified_base 22: mod_base = OTHER; note = uracil
  modified_base 28: mod_base = OTHER; note = uracil
  modified_base 30..31: mod_base = OTHER; note = uracil
  modified_base 37: mod_base = OTHER; note = uracil
  modified_base 51: mod_base = OTHER; note = uracil
  modified_base 58..60: mod_base = OTHER; note = uracil
  modified_base 72: mod_base = OTHER; note = uracil
  modified_base 74: mod_base = OTHER; note = uracil
  modified_base 79..80: mod_base = OTHER; note = uracil
  modified_base 82: mod_base = OTHER; note = uracil
  modified_base 87: mod_base = OTHER; note = uracil
  modified_base 89..91: mod_base = OTHER; note = uracil
  modified_base 95..96: mod_base = OTHER; note = uracil
  modified_base 102: mod_base = OTHER; note = uracil
  modified_base 104: mod_base = OTHER; note = uracil
  modified_base 108: mod_base = OTHER; note = uracil
  modified_base 112: mod_base = OTHER; note = uracil
  modified_base 114: mod_base = OTHER; note = uracil
  modified_base 117: mod_base = OTHER; note = uracil
  modified_base 122..123: mod_base = OTHER; note = uracil
  modified_base 135: mod_base = OTHER; note = uracil
  modified_base 139: mod_base = OTHER; note = uracil
  modified_base 141..142: mod_base = OTHER; note = uracil
  modified_base 144..145: mod_base = OTHER; note = uracil
  modified_base 160: mod_base = OTHER; note = uracil
  modified_base 163: mod_base = OTHER; note = uracil
  modified_base 166: mod_base = OTHER; note = uracil
  modified_base 186..187: mod_base = OTHER; note = uracil
  modified_base 190: mod_base = OTHER; note = uracil
  modified_base 192: mod_base = OTHER; note = uracil
  modified_base 199: mod_base = OTHER; note = uracil
  modified_base 201: mod_base = OTHER; note = uracil
  modified_base 209..210: mod_base = OTHER; note = uracil
  modified_base 212..213: mod_base = OTHER; note = uracil
  modified_base 216: mod_base = OTHER; note = uracil
  modified_base 219: mod_base = OTHER; note = uracil
  modified_base 229: mod_base = OTHER; note = uracil
  modified_base 231: mod_base = OTHER; note = uracil
  modified_base 237: mod_base = OTHER; note = uracil
  modified_base 243: mod_base = OTHER; note = uracil
  modified_base 248: mod_base = OTHER; note = uracil
  modified_base 250: mod_base = OTHER; note = uracil
  modified_base 257: mod_base = OTHER; note = uracil
  modified_base 270: mod_base = OTHER; note = uracil
  modified_base 294..295: mod_base = OTHER; note = uracil
  modified_base 300: mod_base = OTHER; note = uracil
  modified_base 40: mod_base = m5c
  modified_base 124: mod_base = m5c
  modified_base 167: mod_base = m5c
  variation 147: note = CpG site, residue is C if methylated or T(=U) if unmethylated
  variation 151: note = CpG site, residue is C if methylated or T(=U) if unmethylated
taaaaagaaatttttgttttatattttttttatatttaacgtaggtggtgttttgggtttaagtgaggtgatttattgttttagtttttttttttttgttttataagtagatatagtaaagttcggagagtaatttgatttttttaygatygtagtggattgtattcgggatgatatttagttttttttttttgtgggttttgtaaaattatttattgtttaaagaagttttttgatatgttttgaattttaagaataaatgaaaatggtattttgggaaaaaaaaaatgaagttagaat

SEQ ID NO: 137 - DNA, 300 bp, synthetic construct
  source 1..300: mol_type = other DNA
  modified_base 1..2: mod_base = OTHER; note = uracil
  modified_base 4..5: mod_base = OTHER; note = uracil
  modified_base 7..8: mod_base = OTHER; note = uracil
  modified_base 12: mod_base = OTHER; note = uracil
  modified_base 17: mod_base = OTHER; note = uracil
  modified_base 25..26: mod_base = OTHER; note = uracil
  modified_base 30: mod_base = OTHER; note = uracil
  modified_base 37..38: mod_base = OTHER; note = uracil
  modified_base 43: mod_base = OTHER; note = uracil
  modified_base 53..54: mod_base = OTHER; note = uracil
  modified_base 56..57: mod_base = OTHER; note = uracil
  modified_base 59: mod_base = OTHER; note = uracil
  modified_base 66: mod_base = OTHER; note = uracil
  modified_base 74..79: mod_base = OTHER; note = uracil
  modified_base 81..83: mod_base = OTHER; note = uracil
  modified_base 89: mod_base = OTHER; note = uracil
  modified_base 91: mod_base = OTHER; note = uracil
  modified_base 96: mod_base = OTHER; note = uracil
  modified_base 104: mod_base = OTHER; note = uracil
  modified_base 107: mod_base = OTHER; note = uracil
  modified_base 110..111: mod_base = OTHER; note = uracil
  modified_base 114: mod_base = OTHER; note = uracil
  modified_base 118: mod_base = OTHER; note = uracil
  modified_base 121: mod_base = OTHER; note = uracil
  modified_base 123..125: mod_base = OTHER; note = uracil
  modified_base 128..129: mod_base = OTHER; note = uracil
  modified_base 132: mod_base = OTHER; note = uracil
  modified_base 136: mod_base = OTHER; note = uracil
  modified_base 138: mod_base = OTHER; note = uracil
  modified_base 145: mod_base = OTHER; note = uracil
  modified_base 147: mod_base = OTHER; note = uracil
  modified_base 149: mod_base = OTHER; note = uracil
  modified_base 152: mod_base = OTHER; note = uracil
  modified_base 154..155: mod_base = OTHER; note = uracil
  modified_base 162..163: mod_base = OTHER; note = uracil
  modified_base 165: mod_base = OTHER; note = uracil
  modified_base 167..168: mod_base = OTHER; note = uracil
  modified_base 177: mod_base = OTHER; note = uracil
  modified_base 191: mod_base = OTHER; note = uracil
  modified_base 196: mod_base = OTHER; note = uracil
  modified_base 203: mod_base = OTHER; note = uracil
  modified_base 209: mod_base = OTHER; note = uracil
  modified_base 215..217: mod_base = OTHER; note = uracil
  modified_base 225..226: mod_base = OTHER; note = uracil
  modified_base 229: mod_base = OTHER; note = uracil
  modified_base 231: mod_base = OTHER; note = uracil
  modified_base 233: mod_base = OTHER; note = uracil
  modified_base 236: mod_base = OTHER; note = uracil
  modified_base 241: mod_base = OTHER; note = uracil
  modified_base 253: mod_base = OTHER; note = uracil
  modified_base 259: mod_base = OTHER; note = uracil
  modified_base 263: mod_base = OTHER; note = uracil
  modified_base 266..267: mod_base = OTHER; note = uracil
  modified_base 272..273: mod_base = OTHER; note = uracil
  modified_base 277: mod_base = OTHER; note = uracil
  modified_base 279: mod_base = OTHER; note = uracil
  modified_base 283..284: mod_base = OTHER; note = uracil
  modified_base 292: mod_base = OTHER; note = uracil
  modified_base 295: mod_base = OTHER; note = uracil
  modified_base 97: mod_base = m5c
  modified_base 170: mod_base = m5c
  modified_base 178: mod_base = m5c
  modified_base 197: mod_base = m5c
  modified_base 200: mod_base = m5c
  modified_base 242: mod_base = m5c
  modified_base 293: mod_base = m5c
  variation 150: note = CpG site, residue is C if methylated or T(=U) if unmethylated
ttttttttagtttttgtatatatattaggttggtatttattgtaggtggggattttttttttgggttttggagtttttttttttgtgtttttgtatcggggagttttttttttttgttttttttttttttttttgtttattaaatttttygttttttaaaattattttacgtgtgttcgtgttgttttatttaaatcggcggtaggattaagaatttttgtgtttttgtatttattagagtcgtatgataattaagagttgattatttgggttatttttatattattagtgtcgtattta

SEQ ID NO: 138 - DNA, 300 bp, synthetic construct
  source 1..300: mol_type = other DNA
  modified_base 10: mod_base = OTHER; note = uracil
  modified_base 12: mod_base = OTHER; note = uracil
  modified_base 30..32: mod_base = OTHER; note = uracil
  modified_base 40: mod_base = OTHER; note = uracil
  modified_base 43: mod_base = OTHER; note = uracil
  modified_base 45: mod_base = OTHER; note = uracil
  modified_base 54: mod_base = OTHER; note = uracil
  modified_base 61: mod_base = OTHER; note = uracil
  modified_base 63: mod_base = OTHER; note = uracil
  modified_base 73: mod_base = OTHER; note = uracil
  modified_base 79: mod_base = OTHER; note = uracil
  modified_base 81: mod_base = OTHER; note = uracil
  modified_base 89: mod_base = OTHER; note = uracil
  modified_base 95..96: mod_base = OTHER; note = uracil
  modified_base 99: mod_base = OTHER; note = uracil
  modified_base 102: mod_base = OTHER; note = uracil
  modified_base 117: mod_base = OTHER; note = uracil
  modified_base 120: mod_base = OTHER; note = uracil
  modified_base 126: mod_base = OTHER; note = uracil
  modified_base 128: mod_base = OTHER; note = uracil
  modified_base 166: mod_base = OTHER; note = uracil
  modified_base 185: mod_base = OTHER; note = uracil
  modified_base 198: mod_base = OTHER; note = uracil
  modified_base 200..202: mod_base = OTHER; note = uracil
  modified_base 208: mod_base = OTHER; note = uracil
  modified_base 214: mod_base = OTHER; note = uracil
  modified_base 216: mod_base = OTHER; note = uracil
  modified_base 228: mod_base = OTHER; note = uracil
  modified_base 230..231: mod_base = OTHER; note = uracil
  modified_base 236..238: mod_base = OTHER; note = uracil
  modified_base 250..253: mod_base = OTHER; note = uracil
  modified_base 255..256: mod_base = OTHER; note = uracil
  modified_base 259: mod_base = OTHER; note = uracil
  modified_base 268..269: mod_base = OTHER; note = uracil
  modified_base 272..273: mod_base = OTHER; note = uracil
  modified_base 285: mod_base = OTHER; note = uracil
  modified_base 291: mod_base = OTHER; note = uracil
  modified_base 7: mod_base = m5c
  modified_base 58: mod_base = m5c
  modified_base 100: mod_base = m5c
  modified_base 103: mod_base = m5c
  modified_base 122: mod_base = m5c
  modified_base 130: mod_base = m5c
  modified_base 203: mod_base = m5c
  variation 150: note = CpG site, residue is C if methylated or T(=U) if unmethylated
taaatgcggtattaatggtatgagaatggtttaggtagttagtttttgattattatacggttttgatgagtgtaggaatataagggtttttgattttgtcgtcggtttagataaaataatacggatatacgtggagtggttttaaggagyggagagtttaatgagtaagaaggaagggagaagatagaaggaagaagtttttcggtatagagatatagggaggggggttttaaagtttaaagaggaggtttttatttgtaatggatattagtttggtatatatgtaaagattggaggagg

SEQ ID NO: 139 - DNA, 300 bp, synthetic construct
  source 1..300: mol_type = other DNA
  modified_base 14: mod_base = OTHER; note = uracil
  modified_base 17: mod_base = OTHER; note = uracil
  modified_base 22..23: mod_base = OTHER; note = uracil
  modified_base 28: mod_base = OTHER; note = uracil
  modified_base 33: mod_base = OTHER; note = uracil
  modified_base 50: mod_base = OTHER; note = uracil
  modified_base 56: mod_base = OTHER; note = uracil
  modified_base 59: mod_base = OTHER; note = uracil
  modified_base 76: mod_base = OTHER; note = uracil
  modified_base 79: mod_base = OTHER; note = uracil
  modified_base 85: mod_base = OTHER; note = uracil
  modified_base 87: mod_base = OTHER; note = uracil
  modified_base 95..96: mod_base = OTHER; note = uracil
  modified_base 103: mod_base = OTHER; note = uracil
  modified_base 105: mod_base = OTHER; note = uracil
  modified_base 111..112: mod_base = OTHER; note = uracil
  modified_base 114..115: mod_base = OTHER; note = uracil
  modified_base 122..123: mod_base = OTHER; note = uracil
  modified_base 125: mod_base = OTHER; note = uracil
  modified_base 128: mod_base = OTHER; note = uracil
  modified_base 132: mod_base = OTHER; note = uracil
  modified_base 135..137: mod_base = OTHER; note = uracil
  modified_base 139..141: mod_base = OTHER; note = uracil
  modified_base 145: mod_base = OTHER; note = uracil
  modified_base 147: mod_base = OTHER; note = uracil
  modified_base 151: mod_base = OTHER; note = uracil
  modified_base 159..160: mod_base = OTHER; note = uracil
  modified_base 168..171: mod_base = OTHER; note = uracil
  modified_base 178: mod_base = OTHER; note = uracil
  modified_base 188: mod_base = OTHER; note = uracil
  modified_base 195..196: mod_base = OTHER; note = uracil
  modified_base 199: mod_base = OTHER; note = uracil
  modified_base 201..203: mod_base = OTHER; note = uracil
  modified_base 207: mod_base = OTHER; note = uracil
  modified_base 214: mod_base = OTHER; note = uracil
  modified_base 217..218: mod_base = OTHER; note = uracil
  modified_base 221: mod_base = OTHER; note = uracil
  modified_base 227..228: mod_base = OTHER; note = uracil
  modified_base 235: mod_base = OTHER; note = uracil
  modified_base 237..238: mod_base = OTHER; note = uracil
  modified_base 241..243: mod_base = OTHER; note = uracil
  modified_base 245..246: mod_base = OTHER; note = uracil
  modified_base 249: mod_base = OTHER; note = uracil
  modified_base 252..253: mod_base = OTHER; note = uracil
  modified_base 264: mod_base = OTHER; note = uracil
  modified_base 280: mod_base = OTHER; note = uracil
  modified_base 282: mod_base = OTHER; note = uracil
  modified_base 292: mod_base = OTHER; note = uracil
  modified_base 299: mod_base = OTHER; note = uracil
  modified_base 12: mod_base = m5c
  modified_base 34: mod_base = m5c
  modified_base 39: mod_base = m5c
  modified_base 54: mod_base = m5c
  modified_base 57: mod_base = m5c
  modified_base 129: mod_base = m5c
  modified_base 143: mod_base = m5c
  modified_base 208: mod_base = m5c
  variation 149: note = CpG site, residue is C if methylated or T(=U) if unmethylated
aaggttaaagtcgttgttagattaaggttaaatcgtggcgaggtagttgtttgcgtcgtagagtgtgggtgtgaatagttggagtttagtggtttttggagatttagggattatttgtattttatattcggttttttatttacgtataygtagtatgatttgggttttttttttatatagtggaatgttaagtgtttatattttagtcggggttagttaattatggtttgtgggtattattttatttgtagtttgtttttgagttaagaatgttgttgatatttttaaaaatagagaata

SEQ ID NO: 140 - DNA, 300 bp, synthetic construct
  source 1..300: mol_type = other DNA
  modified_base 4: mod_base = OTHER; note = uracil
  modified_base 6: mod_base = OTHER; note = uracil
  modified_base 22: mod_base = OTHER; note = uracil
  modified_base 25: mod_base = OTHER; note = uracil
  modified_base 28: mod_base = OTHER; note = uracil
  modified_base 32: mod_base = OTHER; note = uracil
  modified_base 37: mod_base = OTHER; note = uracil
  modified_base 39: mod_base = OTHER; note = uracil
  modified_base 45: mod_base = OTHER; note = uracil
  modified_base 49: mod_base = OTHER; note = uracil
  modified_base 52: mod_base = OTHER; note = uracil
  modified_base 66..68: mod_base = OTHER; note = uracil
  modified_base 70: mod_base = OTHER; note = uracil
  modified_base 74..75: mod_base = OTHER; note = uracil
  modified_base 84: mod_base = OTHER; note = uracil
  modified_base 88..90: mod_base = OTHER; note = uracil
  modified_base 94: mod_base = OTHER; note = uracil
  modified_base 106: mod_base = OTHER; note = uracil
  modified_base 108: mod_base = OTHER; note = uracil
  modified_base 113: mod_base = OTHER; note = uracil
  modified_base 117..118: mod_base = OTHER; note = uracil
  modified_base 120: mod_base = OTHER; note = uracil
  modified_base 136..138: mod_base = OTHER; note = uracil
  modified_base 143: mod_base = OTHER; note = uracil
  modified_base 147: mod_base = OTHER; note = uracil
  modified_base 169: mod_base = OTHER; note = uracil
  modified_base 183: mod_base = OTHER; note = uracil
  modified_base 191..193: mod_base = OTHER; note = uracil
  modified_base 199: mod_base = OTHER; note = uracil
  modified_base 201..202: mod_base = OTHER; note = uracil
  modified_base 208..209: mod_base = OTHER; note = uracil
  modified_base 211: mod_base = OTHER; note = uracil
  modified_base 216: mod_base = OTHER; note = uracil
  modified_base 218..219: mod_base = OTHER; note = uracil
  modified_base 222: mod_base = OTHER; note = uracil
  modified_base 227: mod_base = OTHER; note = uracil
  modified_base 229: mod_base = OTHER; note = uracil
  modified_base 231..233: mod_base = OTHER; note = uracil
  modified_base 235: mod_base = OTHER; note = uracil
  modified_base 237: mod_base = OTHER; note = uracil
  modified_base 239: mod_base = OTHER; note = uracil
  modified_base 247: mod_base = OTHER; note = uracil
  modified_base 251: mod_base = OTHER; note = uracil
  modified_base 254: mod_base = OTHER; note = uracil
  modified_base 257..258: mod_base = OTHER; note = uracil
  modified_base 262..263: mod_base = OTHER; note = uracil
  modified_base 273..274: mod_base = OTHER; note = uracil
  modified_base 280: mod_base = OTHER; note = uracil
  modified_base 284: mod_base = OTHER; note = uracil
  modified_base 290: mod_base = OTHER; note = uracil
  modified_base 296..297: mod_base = OTHER; note = uracil
  modified_base 91: mod_base = m5c
  modified_base 156: mod_base = m5c
  modified_base 170: mod_base = m5c
  modified_base 242: mod_base = m5c
  modified_base 245: mod_base = m5c
  modified_base 260: mod_base = m5c
  modified_base 265: mod_base = m5c
  modified_base 287: mod_base = m5c
  variation 150: note = CpG site, residue is C if methylated or T(=U) if unmethylated
gttttttgtttttaaaagtgttaataatatttttagtttaaaaataggttgtaggtgggatggtgtttataggttatagttggttgatttcggttagggtgtaggtatttagtattttattgtataaaggggaaatttaggttatattgygtgtgcgtgggtgggaagtcggatgtggaatataggtggtttttgagtttttaggaattattgagttttagttgtttatatttatattttgcggcgtaagtaattatttcgttacggtttagttttggtttagtagcgattttaattttg

SEQ ID NO: 141 - DNA, 300 bp, synthetic construct
  source 1..300: mol_type = other DNA
  modified_base 5: mod_base = OTHER; note = uracil
  modified_base 13: mod_base = OTHER; note = uracil
  modified_base 15: mod_base = OTHER; note = uracil
  modified_base 17..18: mod_base = OTHER; note = uracil
  modified_base 24..26: mod_base = OTHER; note = uracil
  modified_base 30: mod_base = OTHER; note = uracil
  modified_base 38: mod_base = OTHER; note = uracil
  modified_base 41..42: mod_base = OTHER; note = uracil
  modified_base 44: mod_base = OTHER; note = uracil
  modified_base 47..48: mod_base = OTHER; note = uracil
  modified_base 50..51: mod_base = OTHER; note = uracil
  modified_base 56: mod_base = OTHER; note = uracil
  modified_base 58: mod_base = OTHER; note = uracil
  modified_base 66: mod_base = OTHER; note = uracil
  modified_base 69..71: mod_base = OTHER; note = uracil
  modified_base 73..74: mod_base = OTHER; note = uracil
  modified_base 76: mod_base = OTHER; note = uracil
  modified_base 80: mod_base = OTHER; note = uracil
  modified_base 82..83: mod_base = OTHER; note = uracil
  modified_base 91: mod_base = OTHER; note = uracil
  modified_base 97: mod_base = OTHER; note = uracil
  modified_base 100: mod_base = OTHER; note = uracil
  modified_base 104: mod_base = OTHER; note = uracil
  modified_base 106: mod_base = OTHER; note = uracil
  modified_base 110..111: mod_base = OTHER; note = uracil
  modified_base 113..114: mod_base = OTHER; note = uracil
  modified_base 118..119: mod_base = OTHER; note = uracil
  modified_base 123: mod_base = OTHER; note = uracil
  modified_base 160: mod_base = OTHER; note = uracil
  modified_base 168..170: mod_base = OTHER; note = uracil
  modified_base 174: mod_base = OTHER; note = uracil
  modified_base 179: mod_base = OTHER; note = uracil
  modified_base 181: mod_base = OTHER; note = uracil
  modified_base 185: mod_base = OTHER; note = uracil
  modified_base 187..188: mod_base = OTHER; note = uracil
  modified_base 193: mod_base = OTHER; note = uracil
  modified_base 195: mod_base = OTHER; note = uracil
  modified_base 203..204: mod_base = OTHER; note = uracil
  modified_base 206..208: mod_base = OTHER; note = uracil
  modified_base 210..211: mod_base = OTHER; note = uracil
  modified_base 213: mod_base = OTHER; note = uracil
  modified_base 216: mod_base = OTHER; note = uracil
  modified_base 219..221: mod_base = OTHER; note = uracil
  modified_base 228: mod_base = OTHER; note = uracil
  modified_base 237: mod_base = OTHER; note = uracil
  modified_base 241..242: mod_base = OTHER; note = uracil
  modified_base 248: mod_base = OTHER; note = uracil
  modified_base 250: mod_base = OTHER; note = uracil
  modified_base 256: mod_base = OTHER; note = uracil
  modified_base 260: mod_base = OTHER; note = uracil
  modified_base 285: mod_base = OTHER; note = uracil
  modified_base 290..291: mod_base = OTHER; note = uracil
  modified_base 295..296: mod_base = OTHER; note = uracil
  modified_base 298: mod_base = OTHER; note = uracil
  modified_base 22: mod_base = m5c
  modified_base 92: mod_base = m5c
  modified_base 108: mod_base = m5c
  modified_base 158: mod_base = m5c
  modified_base 257: mod_base = m5c
  modified_base 287: mod_base = m5c
  variation 150: note = CpG site, residue is C if methylated or T(=U) if unmethylated
  variation 199: note = CpG site, residue is C if methylated or T(=U) if unmethylated
  variation 253: note = CpG site, residue is C if methylated or T(=U) if unmethylated
gagatagggttttatttttgtcgtttaggttggagtgtagttttaattttttgggtttagtggatttttttattttagatttttgagtagtcgggattataggtatacgttattaggtttagttaattttttgtatttttttgtagagaygaggtttcgttaggttgtttaggttggtttttaatttttgggtttaagygatttatttattttagttttttaaagtgttggggttataggtttgagttatagygttcggttgaaagtgaagttgaatgagatgattcgtttaggttatat

SEQ ID NO: 142 - DNA, 300 bp, synthetic construct
  source 1..300: mol_type = other DNA
  modified_base 7..8: mod_base = OTHER; note = uracil
  modified_base 18: mod_base = OTHER; note = uracil
  modified_base 21: mod_base = OTHER; note = uracil
  modified_base 23: mod_base = OTHER; note = uracil
  modified_base 27: mod_base = OTHER; note = uracil
  modified_base 30: mod_base = OTHER; note = uracil
  modified_base 33: mod_base = OTHER; note = uracil
  modified_base 35: mod_base = OTHER; note = uracil
  modified_base 39: mod_base = OTHER; note = uracil
  modified_base 42: mod_base = OTHER; note = uracil
  modified_base 49: mod_base = OTHER; note = uracil
  modified_base 55: mod_base = OTHER; note = uracil
  modified_base 57: mod_base = OTHER; note = uracil
  modified_base 61..62: mod_base = OTHER; note = uracil
  modified_base 68..71: mod_base = OTHER; note = uracil
  modified_base 74: mod_base = OTHER; note = uracil
  modified_base 76: mod_base = OTHER; note = uracil
  modified_base 86: mod_base = OTHER; note = uracil
  modified_base 103: mod_base = OTHER; note = uracil
  modified_base 109..111: mod_base = OTHER; note = uracil
  modified_base 124..125: mod_base = OTHER; note = uracil
  modified_base 128..129: mod_base = OTHER; note = uracil
  modified_base 134: mod_base = OTHER; note = uracil
  modified_base 137..138: mod_base = OTHER; note = uracil
  modified_base 147..148: mod_base = OTHER; note = uracil
  modified_base 153: mod_base = OTHER; note = uracil
  modified_base 155: mod_base = OTHER; note = uracil
  modified_base 158: mod_base = OTHER; note = uracil
  modified_base 168: mod_base = OTHER; note = uracil
  modified_base 179: mod_base = OTHER; note = uracil
  modified_base 184..185: mod_base = OTHER; note = uracil
  modified_base 198..199: mod_base = OTHER; note = uracil
  modified_base 206..207: mod_base = OTHER; note = uracil
  modified_base 211: mod_base = OTHER; note = uracil
  modified_base 214: mod_base = OTHER; note = uracil
  modified_base 216: mod_base = OTHER; note = uracil
  modified_base 223: mod_base = OTHER; note = uracil
  modified_base 238..239: mod_base = OTHER; note = uracil
  modified_base 241: mod_base = OTHER; note = uracil
  modified_base 246..248: mod_base = OTHER; note = uracil
  modified_base 261: mod_base = OTHER; note = uracil
  modified_base 264: mod_base = OTHER; note = uracil
  modified_base 266: mod_base = OTHER; note = uracil
  modified_base 268..269: mod_base = OTHER; note = uracil
  modified_base 272..273: mod_base = OTHER; note = uracil
  modified_base 281: mod_base = OTHER; note = uracil
  modified_base 292..294: mod_base = OTHER; note = uracil
  modified_base 298: mod_base = OTHER; note = uracil
  modified_base 300: mod_base = OTHER; note = uracil
  modified_base 13: mod_base = m5c
  modified_base 43: mod_base = m5c
  modified_base 142: mod_base = m5c
  modified_base 192: mod_base = m5c
  modified_base 208: mod_base = m5c
  modified_base 278: mod_base = m5c
  variation 47: note = CpG site, residue is C if methylated or T(=U) if unmethylated
  variation 101: note = CpG site, residue is C if methylated or T(=U) if unmethylated
  variation 150: note = CpG site, residue is C if methylated or T(=U) if unmethylated
atgtggtttggacgagttattttatttaattttatttttagtcggaygttgtgatttaggtttgtaattttagtattttgggaagttgaggtgggtggatygtttgagtttaggagttagagattagtttgggtaatttagcgaaatttygtttttataaaaaaatataaaaaattagttaggtttggtggcgtgtgtttgtagtttcggttatttaggagtttgaggtgggaagatttattgagtttaggaggttgaggttgtattttagtttgggcgataggagtgaaattttgtttt

SEQ ID NO: 143 - DNA, 300 bp, synthetic construct
  source 1..300: mol_type = other DNA
  modified_base 2: mod_base = OTHER; note = uracil
  modified_base 6..7: mod_base = OTHER; note = uracil
  modified_base 9..10: mod_base = OTHER; note = uracil
  modified_base 14..15: mod_base = OTHER; note = uracil
  modified_base 19: mod_base = OTHER; note = uracil
  modified_base 56: mod_base = OTHER; note = uracil
  modified_base 64..66: mod_base = OTHER; note = uracil
  modified_base 70: mod_base = OTHER; note = uracil
  modified_base 75: mod_base = OTHER; note = uracil
  modified_base 77: mod_base = OTHER; note = uracil
  modified_base 81: mod_base = OTHER; note = uracil
  modified_base 83..84: mod_base = OTHER; note = uracil
  modified_base 89: mod_base = OTHER; note = uracil
  modified_base 91: mod_base = OTHER; note = uracil
  modified_base 99..100: mod_base = OTHER; note = uracil
  modified_base 102..104: mod_base = OTHER; note = uracil
  modified_base 106..107: mod_base = OTHER; note = uracil
  modified_base 109: mod_base = OTHER; note = uracil
  modified_base 112: mod_base = OTHER; note = uracil
  modified_base 115..117: mod_base = OTHER; note = uracil
  modified_base 124: mod_base = OTHER; note = uracil
  modified_base 133: mod_base = OTHER; note = uracil
  modified_base 137..138: mod_base = OTHER; note = uracil
  modified_base 144: mod_base = OTHER; note = uracil
  modified_base 146: mod_base = OTHER; note = uracil
  modified_base 152: mod_base = OTHER; note = uracil
  modified_base 156: mod_base = OTHER; note = uracil
  modified_base 181: mod_base = OTHER; note = uracil
  modified_base 186..187: mod_base = OTHER; note = uracil
  modified_base 191..192: mod_base = OTHER; note = uracil
  modified_base 194: mod_base = OTHER; note = uracil
  modified_base 199: mod_base = OTHER; note = uracil
  modified_base 203: mod_base = OTHER; note = uracil
  modified_base 209: mod_base = OTHER; note = uracil
  modified_base 219..220: mod_base = OTHER; note = uracil
  modified_base 232: mod_base = OTHER; note = uracil
  modified_base 236: mod_base = OTHER; note = uracil
  modified_base 239: mod_base = OTHER; note = uracil
  modified_base 241: mod_base = OTHER; note = uracil
  modified_base 250: mod_base = OTHER; note = uracil
  modified_base 256..257: mod_base = OTHER; note = uracil
  modified_base 263: mod_base = OTHER; note = uracil
  modified_base 269..270: mod_base = OTHER; note = uracil
  modified_base 272: mod_base = OTHER; note = uracil
  modified_base 284: mod_base = OTHER; note = uracil
  modified_base 289: mod_base = OTHER; note = uracil
  modified_base 295..296: mod_base = OTHER; note = uracil
  modified_base 300: mod_base = OTHER; note = uracil
  modified_base 4: mod_base = m5c
  modified_base 54: mod_base = m5c
  modified_base 153: mod_base = m5c
  modified_base 183: mod_base = m5c
  modified_base 217: mod_base = m5c
  modified_base 279: mod_base = m5c
  variation 46: note = CpG site, residue is C if methylated or T(=U) if unmethylated
  variation 95: note = CpG site, residue is C if methylated or T(=U) if unmethylated
  variation 149: note = CpG site, residue is C if methylated or T(=U) if unmethylated
atacgttattaggtttagttaattttttgtatttttttgtagagaygaggtttcgttaggttgtttaggttggtttttaatttttgggtttaagygatttatttattttagttttttaaagtgttggggttataggtttgagttatagygttcggttgaaagtgaagttgaatgagatgattcgtttaggttatatggtaattagtggttgattgacgttaaagttgattttattttttttaatgggtttagagtttaaattttggaattttagaagacgttgttattttggttttaagt

SEQ ID NO: 144 - DNA, 300 bp, synthetic construct
  source 1..300: mol_type = other DNA
  modified_base 1: mod_base = OTHER; note = uracil
  modified_base 8..9: mod_base = OTHER; note = uracil
  modified_base 17: mod_base = OTHER; note = uracil
  modified_base 23: mod_base = OTHER; note = uracil
  modified_base 26: mod_base = OTHER; note = uracil
  modified_base 34..35: mod_base = OTHER; note = uracil
  modified_base 46: mod_base = OTHER; note = uracil
  modified_base 48: mod_base = OTHER; note = uracil
  modified_base 53..55: mod_base = OTHER; note = uracil
  modified_base 73: mod_base = OTHER; note = uracil
  modified_base 76: mod_base = OTHER; note = uracil
  modified_base 85: mod_base = OTHER; note = uracil
  modified_base 89: mod_base = OTHER; note = uracil
  modified_base 92..93: mod_base = OTHER; note = uracil
  modified_base 95: mod_base = OTHER; note = uracil
  modified_base 102..103: mod_base = OTHER; note = uracil
  modified_base 110..111: mod_base = OTHER; note = uracil
  modified_base 121: mod_base = OTHER; note = uracil
  modified_base 124: mod_base = OTHER; note = uracil
  modified_base 126: mod_base = OTHER; note = uracil
  modified_base 130: mod_base = OTHER; note = uracil
  modified_base 133: mod_base = OTHER; note = uracil
  modified_base 136: mod_base = OTHER; note = uracil
  modified_base 138: mod_base = OTHER; note = uracil
  modified_base 142: mod_base = OTHER; note = uracil
  modified_base 145: mod_base = OTHER; note = uracil
  modified_base 152: mod_base = OTHER; note = uracil
  modified_base 158: mod_base = OTHER; note = uracil
  modified_base 160: mod_base = OTHER; note = uracil
  modified_base 164..165: mod_base = OTHER; note = uracil
  modified_base 171..174: mod_base = OTHER; note = uracil
  modified_base 177: mod_base = OTHER; note = uracil
  modified_base 179: mod_base = OTHER; note = uracil
  modified_base 189: mod_base = OTHER; note = uracil
  modified_base 206: mod_base = OTHER; note = uracil
  modified_base 212..214: mod_base = OTHER; note = uracil
  modified_base 227..228: mod_base = OTHER; note = uracil
  modified_base 231..232: mod_base = OTHER; note = uracil
  modified_base 237: mod_base = OTHER; note = uracil
  modified_base 240..241: mod_base = OTHER; note = uracil
  modified_base 250..251: mod_base = OTHER; note = uracil
  modified_base 256: mod_base = OTHER; note = uracil
  modified_base 258: mod_base = OTHER; note = uracil
  modified_base 261: mod_base = OTHER; note = uracil
  modified_base 271: mod_base = OTHER; note = uracil
  modified_base 282: mod_base = OTHER; note = uracil
  modified_base 287..288: mod_base = OTHER; note = uracil
  modified_base 20: mod_base = m5c
  modified_base 82: mod_base = m5c
  modified_base 116: mod_base = m5c
  modified_base 146: mod_base = m5c
  modified_base 245: mod_base = m5c
  modified_base 295: mod_base = m5c
  variation 150: note = CpG site, residue is C if methylated or T(=U) if unmethylated
  variation 204: note = CpG site, residue is C if methylated or T(=U) if unmethylated
  variation 253: note = CpG site, residue is C if methylated or T(=U) if unmethylated
tttggaattagaatagtaacgttttttgaggttttagaatttggattttgaatttattgagaagaatgaaattaattttggcgttaattagttattgattgttatgtggtttggacgagttattttatttaattttatttttagtcggaygttgtgatttaggtttgtaattttagtattttgggaagttgaggtgggtggatygtttgagtttaggagttagagattagtttgggtaatttagcgaaatttygtttttataaaaaaatataaaaaattagttaggtttggtggcgtgtg

SEQ ID NO: 145 - DNA, 300 bp, synthetic construct
  source 1..300: mol_type = other DNA
  modified_base 6: mod_base = OTHER; note = uracil
  modified_base 9: mod_base = OTHER; note = uracil
  modified_base 15: mod_base = OTHER; note = uracil
  modified_base 19..20: mod_base = OTHER; note = uracil
  modified_base 24: mod_base = OTHER; note = uracil
  modified_base 29..30: mod_base = OTHER; note = uracil
  modified_base 32: mod_base = OTHER; note = uracil
  modified_base 36: mod_base = OTHER; note = uracil
  modified_base 41: mod_base = OTHER; note = uracil
  modified_base 45: mod_base = OTHER; note = uracil
  modified_base 50: mod_base = OTHER; note = uracil
  modified_base 56..57: mod_base = OTHER; note = uracil
  modified_base 59: mod_base = OTHER; note = uracil
  modified_base 66: mod_base = OTHER; note = uracil
  modified_base 71: mod_base = OTHER; note = uracil
  modified_base 84: mod_base = OTHER; note = uracil
  modified_base 88: mod_base = OTHER; note = uracil
  modified_base 90..91: mod_base = OTHER; note = uracil
  modified_base 98: mod_base = OTHER; note = uracil
  modified_base 100: mod_base = OTHER; note = uracil
  modified_base 108: mod_base = OTHER; note = uracil
  modified_base 113: mod_base = OTHER; note = uracil
  modified_base 119: mod_base = OTHER; note = uracil
  modified_base 123: mod_base = OTHER; note = uracil
  modified_base 127: mod_base = OTHER; note = uracil
  modified_base 131: mod_base = OTHER; note = uracil
  modified_base 138..139: mod_base = OTHER; note = uracil
  modified_base 142: mod_base = OTHER; note = uracil
  modified_base 158: mod_base = OTHER; note = uracil
  modified_base 165: mod_base = OTHER; note = uracil
  modified_base 167: mod_base = OTHER; note = uracil
  modified_base 172..173: mod_base = OTHER; note = uracil
  modified_base 180..181: mod_base = OTHER; note = uracil
  modified_base 189: mod_base = OTHER; note = uracil
  modified_base 195..196: mod_base = OTHER; note = uracil
  modified_base 201: mod_base = OTHER; note = uracil
  modified_base 211: mod_base = OTHER; note = uracil
  modified_base 214..217: mod_base = OTHER; note = uracil
  modified_base 226: mod_base = OTHER; note = uracil
  modified_base 229: mod_base = OTHER; note = uracil
  modified_base 231..232: mod_base = OTHER; note = uracil
  modified_base 235: mod_base = OTHER; note = uracil
  modified_base 238: mod_base = OTHER; note = uracil
  modified_base 240: mod_base = OTHER; note = uracil
  modified_base 242: mod_base = OTHER; note = uracil
  modified_base 251: mod_base = OTHER; note = uracil
  modified_base 254: mod_base = OTHER; note = uracil
  modified_base 256..257: mod_base = OTHER; note = uracil
  modified_base 262: mod_base = OTHER; note = uracil
  modified_base 266: mod_base = OTHER; note = uracil
  modified_base 281..282: mod_base = OTHER; note = uracil
  modified_base 284: mod_base = OTHER; note = uracil
  modified_base 289: mod_base = OTHER; note = uracil
  modified_base 293: mod_base = OTHER; note = uracil
  modified_base 295: mod_base = OTHER; note = uracil
  modified_base 297..298: mod_base = OTHER; note = uracil
  modified_base 12: mod_base = m5c
  modified_base 68: mod_base = m5c
  modified_base 96: mod_base = m5c
  modified_base 114: mod_base = m5c
  modified_base 175: mod_base = m5c
  modified_base 182: mod_base = m5c
  modified_base 245: mod_base = m5c
  modified_base 278: mod_base = m5c
  variation 150: note = CpG site, residue is C if methylated or T(=U) if unmethylated
agtgattgtagcgttaggttaagtttggttatttatatgtttggtatgatagtggttttagagtattcgtttgagaagaagagttattatttgagcgttttggagaatttagtcggagtttttaggtagtttgggagtttatatggaggygtgtaggtttatgttttatgtttacgttgttcgggagataaaatttttttttatttagagttgttttaaaatgttttgtattagttttttattgcggtggttttattttagtatataggtatgtggacggttattgtgttggtttatttt

SEQ ID NO: 146 - DNA, 300 bp, synthetic construct
  source 1..300: mol_type = other DNA
  modified_base 9..10: mod_base = OTHER; note = uracil
  modified_base 13: mod_base = OTHER; note = uracil
  modified_base 15: mod_base = OTHER; note = uracil
  modified_base 21: mod_base = OTHER; note = uracil
  modified_base 25..26: mod_base = OTHER; note = uracil
  modified_base 28: mod_base = OTHER; note = uracil
  modified_base 32..33: mod_base = OTHER; note = uracil
  modified_base 40: mod_base = OTHER; note = uracil
  modified_base 51..52: mod_base = OTHER; note = uracil
  modified_base 54: mod_base = OTHER; note = uracil
  modified_base 57: mod_base = OTHER; note = uracil
  modified_base 67: mod_base = OTHER; note = uracil
  modified_base 73: mod_base = OTHER; note = uracil
  modified_base 78: mod_base = OTHER; note = uracil
  modified_base 88: mod_base = OTHER; note = uracil
  modified_base 91: mod_base = OTHER; note = uracil
  modified_base 93: mod_base = OTHER; note = uracil
  modified_base 114: mod_base = OTHER; note = uracil
  modified_base 116..117: mod_base = OTHER; note = uracil
  modified_base 122: mod_base = OTHER; note = uracil
  modified_base 131: mod_base = OTHER; note = uracil
  modified_base 138: mod_base = OTHER; note = uracil
  modified_base 144..145: mod_base = OTHER; note = uracil
  modified_base 148: mod_base = OTHER; note = uracil
  modified_base 152..153: mod_base = OTHER; note = uracil
  modified_base 155..156: mod_base = OTHER; note = uracil
  modified_base 164: mod_base = OTHER; note = uracil
  modified_base 166..168: mod_base = OTHER; note = uracil
  modified_base 172: mod_base = OTHER; note = uracil
  modified_base 175..176: mod_base = OTHER; note = uracil
  modified_base 183: mod_base = OTHER; note = uracil
  modified_base 185: mod_base = OTHER; note = uracil
  modified_base 189: mod_base = OTHER; note = uracil
  modified_base 196: mod_base = OTHER; note = uracil
  modified_base 198..199: mod_base = OTHER; note = uracil
  modified_base 206: mod_base = OTHER; note = uracil
  modified_base 208: mod_base = OTHER; note = uracil
  modified_base 218: mod_base = OTHER; note = uracil
  modified_base 220: mod_base = OTHER; note = uracil
  modified_base 223: mod_base = OTHER; note = uracil
  modified_base 226: mod_base = OTHER; note = uracil
  modified_base 228: mod_base = OTHER; note = uracil
  modified_base 238: mod_base = OTHER; note = uracil
  modified_base 240: mod_base = OTHER; note = uracil
  modified_base 246..247: mod_base = OTHER; note = uracil
  modified_base 249: mod_base = OTHER; note = uracil
  modified_base 253: mod_base = OTHER; note = uracil
  modified_base 257..258: mod_base = OTHER; note = uracil
  modified_base 262: mod_base = OTHER; note = uracil
  modified_base 273..274: mod_base = OTHER; note = uracil
  modified_base 278: mod_base = OTHER; note = uracil
  modified_base 283..284: mod_base = OTHER; note = uracil
  modified_base 290: mod_base = OTHER; note = uracil
  modified_base 293: mod_base = OTHER; note = uracil
  modified_base 297: mod_base = OTHER; note = uracil
  modified_base 299: mod_base = OTHER; note = uracil
  modified_base 22: mod_base = m5c
  modified_base 55: mod_base = m5c
  modified_base 118: mod_base = m5c
  modified_base 125: mod_base = m5c
  modified_base 186: mod_base = m5c
  modified_base 204: mod_base = m5c
  modified_base 232: mod_base = m5c
  modified_base 288: mod_base = m5c
  variation 150: note = CpG site, residue is C if methylated or T(=U) if unmethylated
aaggtgagttagtatagtggtcgtttatatatttgtatgttaaggtgaagttatcgtagtgagaagttggtgtagaatattttggggtagttttaaatagaaaaggattttgtttttcgggtaacgtggatatgagatataagtttataygtttttatgtaggtttttagattgtttgaaagtttcggttaagttttttagagcgtttaggtgatagtttttttttttagacgagtattttgaggttattgttatgttagatatgtaagtggttaagtttggtttgacgttgtagttatt

SEQ ID NO: 147 - DNA, 300 bp, synthetic construct
  source 1..300: mol_type = other DNA
  modified_base 5: mod_base = OTHER; note = uracil
  modified_base 7..8: mod_base = OTHER; note = uracil
  modified_base 14: mod_base = OTHER; note = uracil
  modified_base 18..19: mod_base = OTHER; note = uracil
  modified_base 22..23: mod_base = OTHER; note = uracil
  modified_base 26: mod_base = OTHER; note = uracil
  modified_base 29: mod_base = OTHER; note = uracil
  modified_base 32..33: mod_base = OTHER; note = uracil
  modified_base 48: mod_base = OTHER; note = uracil
  modified_base 56: mod_base = OTHER; note = uracil
  modified_base 78..79: mod_base = OTHER; note = uracil
  modified_base 81: mod_base = OTHER; note = uracil
  modified_base 86: mod_base = OTHER; note = uracil
  modified_base 94..96: mod_base = OTHER; note = uracil
  modified_base 107: mod_base = OTHER; note = uracil
  modified_base 110: mod_base = OTHER; note = uracil
  modified_base 115: mod_base = OTHER; note = uracil
  modified_base 117: mod_base = OTHER; note = uracil
  modified_base 128: mod_base = OTHER; note = uracil
  modified_base 144..145: mod_base = OTHER; note = uracil
  modified_base 175: mod_base = OTHER; note = uracil
  modified_base 178..179: mod_base = OTHER; note = uracil
  modified_base 182..183: mod_base = OTHER; note = uracil
  modified_base 186: mod_base = OTHER; note = uracil
  modified_base 189: mod_base = OTHER; note = uracil
  modified_base 191: mod_base = OTHER; note = uracil
  modified_base 194: mod_base = OTHER; note = uracil
  modified_base 198: mod_base = OTHER; note = uracil
  modified_base 200: mod_base = OTHER; note = uracil
  modified_base 202: mod_base = OTHER; note = uracil
  modified_base 212: mod_base = OTHER; note = uracil
  modified_base 216: mod_base = OTHER; note = uracil
  modified_base 220: mod_base = OTHER; note = uracil
  modified_base 222: mod_base = OTHER; note = uracil
  modified_base 230: mod_base = OTHER; note = uracil
  modified_base 249: mod_base = OTHER; note = uracil
  modified_base 263: mod_base = OTHER; note = uracil
  modified_base 273: mod_base = OTHER; note = uracil
  modified_base 285..287: mod_base = OTHER; note = uracil
  modified_base 295: mod_base = OTHER; note = uracil
  modified_base 297: mod_base = OTHER; note = uracil
  modified_base 1: mod_base = m5c
  modified_base 16: mod_base = m5c
  modified_base 20: mod_base = m5c
  modified_base 30: mod_base = m5c
  modified_base 40: mod_base = m5c
  modified_base 42: mod_base = m5c
  modified_base 49: mod_base = m5c
  modified_base 53: mod_base = m5c
  modified_base 60: mod_base = m5c
  modified_base 62: mod_base = m5c
  modified_base 67: mod_base = m5c
  modified_base 72: mod_base = m5c
  modified_base 82: mod_base = m5c
  modified_base 97: mod_base = m5c
  modified_base 99: mod_base = m5c
  modified_base 105: mod_base = m5c
  modified_base 108: mod_base = m5c
  modified_base 111: mod_base = m5c
  modified_base 120: mod_base = m5c
  modified_base 132: mod_base = m5c
  modified_base 142: mod_base = m5c
  modified_base 146: mod_base = m5c
  modified_base 155: mod_base = m5c
  modified_base 172: mod_base = m5c
  modified_base 176: mod_base = m5c
  modified_base 213: mod_base = m5c
  modified_base 224: mod_base = m5c
  modified_base 261: mod_base = m5c
  modified_base 265: mod_base = m5c
  modified_base 274: mod_base = m5c
  modified_base 288: mod_base = m5c
  modified_base 290: mod_base = m5c
  modified_base 299: mod_base = m5c
  variation 150: note = CpG site, residue is C if methylated or T(=U) if unmethylated
cgggtatttaggtttcgttcgtttgtagtcgtttggggacgcgggtttcggacggttggcgcggggcggggcggggattatcgagtaggaagttttcgcggaagcgtcgtcgggtatagcgtgggtgttgtcgaggagtggcgttcgggyggggcgggaggttataaatagcggtcgttattttgtttttttttagatatatttaatttagtcggtaggtatacggatgtttatttttaaaaaaagaatttgttttattgcgttcgaggtgatcgggaaggtgttttcgcgggttattcg

SEQ ID NO: 148 - DNA, 300 bp, synthetic construct
  source 1..300: mol_type = other DNA
  modified_base 8..9: mod_base = OTHER; note = uracil
  modified_base 18: mod_base = OTHER; note = uracil
  modified_base 20..21: mod_base = OTHER; note = uracil
  modified_base 24..25: mod_base = OTHER; note = uracil
  modified_base 30: mod_base = OTHER; note = uracil
  modified_base 32..33: mod_base = OTHER; note = uracil
  modified_base 41: mod_base = OTHER; note = uracil
  modified_base 49: mod_base = OTHER; note = uracil
  modified_base 55: mod_base = OTHER; note = uracil
  modified_base 72: mod_base = OTHER; note = uracil
  modified_base 75: mod_base = OTHER; note = uracil
  modified_base 82..83: mod_base = OTHER; note = uracil
  modified_base 86: mod_base = OTHER; note = uracil
  modified_base 90: mod_base = OTHER; note = uracil
  modified_base 105: mod_base = OTHER; note = uracil
  modified_base 116: mod_base = OTHER; note = uracil
  modified_base 127: mod_base = OTHER; note = uracil
  modified_base 130: mod_base = OTHER; note = uracil
  modified_base 140..141: mod_base = OTHER; note = uracil
  modified_base 143..144: mod_base = OTHER; note = uracil
  modified_base 147..149: mod_base = OTHER; note = uracil
  modified_base 152..153: mod_base = OTHER; note = uracil
  modified_base 160..161: mod_base = OTHER; note = uracil
  modified_base 163: mod_base = OTHER; note = uracil
  modified_base 165..166: mod_base = OTHER; note = uracil
  modified_base 171: mod_base = OTHER; note = uracil
  modified_base 174: mod_base = OTHER; note = uracil
  modified_base 176..178: mod_base = OTHER; note = uracil
  modified_base 182: mod_base = OTHER; note = uracil
  modified_base 187..188: mod_base = OTHER; note = uracil
  modified_base 197: mod_base = OTHER; note = uracil
  modified_base 200: mod_base = OTHER; note = uracil
  modified_base 209: mod_base = OTHER; note = uracil
  modified_base 212..213: mod_base = OTHER; note = uracil
  modified_base 216: mod_base = OTHER; note = uracil
  modified_base 225..227: mod_base = OTHER; note = uracil
  modified_base 230..232: mod_base = OTHER; note = uracil
  modified_base 235..237: mod_base = OTHER; note = uracil
  modified_base 242..243: mod_base = OTHER; note = uracil
  modified_base 246: mod_base = OTHER; note = uracil
  modified_base 250: mod_base = OTHER; note = uracil
  modified_base 256..257: mod_base = OTHER; note = uracil
  modified_base 263..266: mod_base = OTHER; note = uracil
  modified_base 273: mod_base = OTHER; note = uracil
  modified_base 276: mod_base = OTHER; note = uracil
  modified_base 289..290: mod_base = OTHER; note = uracil
  modified_base 297..298: mod_base = OTHER; note = uracil
  modified_base 1: mod_base = m5c
  modified_base 10: mod_base = m5c
  modified_base 12: mod_base = m5c
  modified_base 26: mod_base = m5c
  modified_base 35: mod_base = m5c
  modified_base 39: mod_base = m5c
  modified_base 76: mod_base = m5c
  modified_base 87: mod_base = m5c
  modified_base 124: mod_base = m5c
  modified_base 128: mod_base = m5c
  modified_base 145: mod_base = m5c
  modified_base 154: mod_base = m5c
  modified_base 158: mod_base = m5c
  modified_base 168: mod_base = m5c
  modified_base 180: mod_base = m5c
  modified_base 189: mod_base = m5c
  modified_base 192: mod_base = m5c
  modified_base 195: mod_base = m5c
  modified_base 201: mod_base = m5c
  modified_base 203: mod_base = m5c
  modified_base 218: mod_base = m5c
  modified_base 228: mod_base = m5c
  modified_base 233: mod_base = m5c
  modified_base 238: mod_base = m5c
  modified_base 240: mod_base = m5c
  modified_base 247: mod_base = m5c
  modified_base 251: mod_base = m5c
  modified_base 258: mod_base = m5c
  modified_base 260: mod_base = m5c
  modified_base 270: mod_base = m5c
  modified_base 280: mod_base = m5c
  modified_base 284: mod_base = m5c
  modified_base 299: mod_base = m5c
  variation 150: note = CpG site, residue is C if methylated or T(=U) if unmethylated
cgagtgattcgcggggatattttttcggttatttcgagcgtaataaaataagttttttttttaaaaataagtattcgtgtgtttgtcggttaaattaagtgtgtttgaagagaagtaggatggcggtcgttatttataatttttcgtttygttcgggcgttatttttcgatagtatttacgttgtgttcggcggcgttttcgcggggattttttgttcggtggttttcgtttcgtttcgcgttagtcgttcggaattcgcgtttttaggcggttgtaggcgggcgagatttaggtgttcg

SEQ ID NO: 149 - DNA, 300 bp, synthetic construct
  source 1..300: mol_type = other DNA
  modified_base 33: mod_base = OTHER; note = uracil
  modified_base 38: mod_base = OTHER; note = uracil
  modified_base 43..44: mod_base = OTHER; note = uracil
  modified_base 54: mod_base = OTHER; note = uracil
  modified_base 78..80: mod_base = OTHER; note = uracil
  modified_base 89..90: mod_base = OTHER; note = uracil
  modified_base 101..103: mod_base = OTHER; note = uracil
  modified_base 108: mod_base = OTHER; note = uracil
  modified_base 112..114: mod_base = OTHER; note = uracil
  modified_base 118: mod_base = OTHER; note = uracil
  modified_base 123: mod_base = OTHER; note = uracil
  modified_base 130..131: mod_base = OTHER; note = uracil
  modified_base 138: mod_base = OTHER; note = uracil
  modified_base 160: mod_base = OTHER; note = uracil
  modified_base 168..170: mod_base = OTHER; note = uracil
  modified_base 197: mod_base = OTHER; note = uracil
  modified_base 206..208: mod_base = OTHER; note = uracil
  modified_base 212: mod_base = OTHER; note = uracil
  modified_base 215..216: mod_base = OTHER; note = uracil
  modified_base 225..226: mod_base = OTHER; note = uracil
  modified_base 231: mod_base = OTHER; note = uracil
  modified_base 256: mod_base = OTHER; note = uracil
  modified_base 8: mod_base = m5c
  modified_base 13: mod_base = m5c
  modified_base 34: mod_base = m5c
  modified_base 36: mod_base = m5c
  modified_base 48: mod_base = m5c
  modified_base 62: mod_base = m5c
  modified_base 82: mod_base = m5c
  modified_base 85: mod_base = m5c
  modified_base 98: mod_base = m5c
  modified_base 105: mod_base = m5c
  modified_base 109: mod_base = m5c
  modified_base 116: mod_base = m5c
  modified_base 232: mod_base = m5c
  modified_base 237: mod_base = m5c
  modified_base 242: mod_base = m5c
  modified_base 268: mod_base = m5c
  modified_base 272: mod_base = m5c
  variation 151: note = CpG site, residue is C if methylated or T(=U) if unmethylated
gaaggtgcggtgcggtgaggtgagaagagagatcgcgttagattaggcgatgttttagggacgggagaggggtgaggtttacggcggttttggggagcggtttacgatcggtttacgtagagtttgtagttagtgaataggaagtattggygagagggattgagaaatttaagagagtgtggggtgaggaaaaggttaaggaaggtttaggtttttaggaagggtttgggtcggggcggggcgggtggtgggaggtagtggttaggacgggcgggggtgggggtgggggtgggggtaggg

SEQ ID NO: 150 - DNA, 300 bp, synthetic construct
  source 1..300: mol_type = other DNA
  modified_base 1..3: mod_base = OTHER; note = uracil
  modified_base 6..10: mod_base = OTHER; note = uracil
  modified_base 12..16: mod_base = OTHER; note = uracil
  modified_base 18..22: mod_base = OTHER; note = uracil
  modified_base 24..27: mod_base = OTHER; note = uracil
  modified_base 30..31: mod_base = OTHER; note = uracil
  modified_base 35..36: mod_base = OTHER; note = uracil
  modified_base 40..41: mod_base = OTHER; note = uracil
  modified_base 43: mod_base = OTHER; note = uracil
  modified_base 46..47: mod_base = OTHER; note = uracil
  modified_base 49..51: mod_base = OTHER; note = uracil
  modified_base 53..54: mod_base = OTHER; note = uracil
  modified_base 56..57: mod_base = OTHER; note = uracil
  modified_base 60..62: mod_base = OTHER; note = uracil
  modified_base 65..67: mod_base = OTHER; note = uracil
  modified_base 71..73: mod_base = OTHER; note = uracil
  modified_base 77..79: mod_base = OTHER; note = uracil
  modified_base 82..83: mod_base = OTHER; note = uracil
  modified_base 90..91: mod_base = OTHER; note = uracil
  modified_base 96..97: mod_base = OTHER; note = uracil
  modified_base 100..101: mod_base = OTHER; note = uracil
  modified_base 106..107: mod_base = OTHER; note = uracil
  modified_base 112..113: mod_base = OTHER; note = uracil
  modified_base 115: mod_base = OTHER; note = uracil
  modified_base 117..120: mod_base = OTHER; note = uracil
  modified_base 122: mod_base = OTHER; note = uracil
  modified_base 124: mod_base = OTHER; note = uracil
  modified_base 126: mod_base = OTHER; note = uracil
  modified_base 128: mod_base = OTHER; note = uracil
  modified_base 137: mod_base = OTHER; note = uracil
  modified_base 139: mod_base = OTHER; note = uracil
  modified_base 143..145: mod_base = OTHER; note = uracil
  modified_base 147: mod_base = OTHER; note = uracil
  modified_base 151..152: mod_base = OTHER; note = uracil
  modified_base 157: mod_base = OTHER; note = uracil
  modified_base 160..161: mod_base = OTHER; note = uracil
  modified_base 166: mod_base = OTHER; note = uracil
  modified_base 168: mod_base = OTHER; note = uracil
  modified_base 172: mod_base = OTHER; note = uracil
  modified_base 175: mod_base = OTHER; note = uracil
  modified_base 179: mod_base = OTHER; note = uracil
  modified_base 181: mod_base = OTHER; note = uracil
  modified_base 190: mod_base = OTHER; note = uracil
  modified_base 201: mod_base = OTHER; note = uracil
  modified_base 204: mod_base = OTHER; note = uracil
  modified_base 206..209: mod_base = OTHER; note = uracil
  modified_base 214: mod_base = OTHER; note = uracil
  modified_base 217: mod_base = OTHER; note = uracil
  modified_base 224..225: mod_base = OTHER; note = uracil
  modified_base 227: mod_base = OTHER; note = uracil
  modified_base 229..232: mod_base = OTHER; note = uracil
  modified_base 234: mod_base = OTHER; note = uracil
  modified_base 236..237: mod_base = OTHER; note = uracil
  modified_base 241..243: mod_base = OTHER; note = uracil
  modified_base 249: mod_base = OTHER; note = uracil
  modified_base 254..255: mod_base = OTHER; note = uracil
  modified_base 260: mod_base = OTHER; note = uracil
  modified_base 270: mod_base = OTHER; note = uracil
  modified_base 272: mod_base = OTHER; note = uracil
  modified_base 274: mod_base = OTHER; note = uracil
  modified_base 277: mod_base = OTHER; note = uracil
  modified_base 279: mod_base = OTHER; note = uracil
  modified_base 281..282: mod_base = OTHER; note = uracil
  modified_base 284: mod_base = OTHER; note = uracil
  modified_base 286: mod_base = OTHER; note = uracil
  modified_base 289: mod_base = OTHER; note = uracil
  modified_base 291: mod_base = OTHER; note = uracil
  modified_base 294: mod_base = OTHER; note = uracil
  modified_base 296..297: mod_base = OTHER; note = uracil
  modified_base 300: mod_base = OTHER; note = uracil
  modified_base 28: mod_base = m5c
  modified_base 32: mod_base = m5c
  modified_base 58: mod_base = m5c
  modified_base 63: mod_base = m5c
  modified_base 68: mod_base = m5c
  modified_base 184: mod_base = m5c
  modified_base 191: mod_base = m5c
  modified_base 195: mod_base = m5c
  modified_base 202: mod_base = m5c
  modified_base 215: mod_base = m5c
  modified_base 218: mod_base = m5c
  modified_base 238: mod_base = m5c
  modified_base 252: mod_base = m5c
  modified_base 264: mod_base = m5c
  modified_base 266: mod_base = m5c
  modified_base 287: mod_base = m5c
  modified_base 292: mod_base = m5c
  variation 149: note = CpG site, residue is C if methylated or T(=U) if unmethylated
  variation 149: note = CpG site, residue is C if methylated or T(=U) if unmethylated
ttttatttttatttttatttttattttcgttcgttttaattattgttttttattattcgtttcgtttcggtttaggttttttttggaagtttgggttttttttgattttttttttattttatatttttttgggttttttagtttttttygttaatattttttgtttattggttataagttttgcgtgggtcggtcgtgggtcgttttttaggatcgtcgtgggttttatttttttttcgtttttaagatatcgtttggtttagcgcggtttttttttttattttatcgtatcgtattttt

SEQ ID NO: 151 - DNA, 300 bp, synthetic construct
  source 1..300: mol_type = other DNA
  modified_base 7: mod_base = OTHER; note = uracil
  modified_base 14: mod_base = OTHER; note = uracil
  modified_base 38..39: mod_base = OTHER; note = uracil
  modified_base 53: mod_base = OTHER; note = uracil
  modified_base 59: mod_base = OTHER; note = uracil
  modified_base 63..64: mod_base = OTHER; note = uracil
  modified_base 69: mod_base = OTHER; note = uracil
  modified_base 72: mod_base = OTHER; note = uracil
  modified_base 88: mod_base = OTHER; note = uracil
  modified_base 92..93: mod_base = OTHER; note = uracil
  modified_base 96: mod_base = OTHER; note = uracil
  modified_base 101: mod_base = OTHER; note = uracil
  modified_base 109: mod_base = OTHER; note = uracil
  modified_base 113: mod_base = OTHER; note = uracil
  modified_base 127: mod_base = OTHER; note = uracil
  modified_base 141: mod_base = OTHER; note = uracil
  modified_base 146: mod_base = OTHER; note = uracil
  modified_base 149: mod_base = OTHER; note = uracil
  modified_base 165: mod_base = OTHER; note = uracil
  modified_base 167: mod_base = OTHER; note = uracil
  modified_base 170: mod_base = OTHER; note = uracil
  modified_base 175..177: mod_base = OTHER; note = uracil
  modified_base 186..187: mod_base = OTHER; note = uracil
  modified_base 197: mod_base = OTHER; note = uracil
  modified_base 199: mod_base = OTHER; note = uracil
  modified_base 201: mod_base = OTHER; note = uracil
  modified_base 209: mod_base = OTHER; note = uracil
  modified_base 216: mod_base = OTHER; note = uracil
  modified_base 218: mod_base = OTHER; note = uracil
  modified_base 224: mod_base = OTHER; note = uracil
  modified_base 229..231: mod_base = OTHER; note = uracil
  modified_base 235: mod_base = OTHER; note = uracil
  modified_base 248: mod_base = OTHER; note = uracil
  modified_base 254: mod_base = OTHER; note = uracil
  modified_base 261: mod_base = OTHER; note = uracil
  modified_base 264: mod_base = OTHER; note = uracil
  modified_base 271: mod_base = OTHER; note = uracil
  modified_base 275: mod_base = OTHER; note = uracil
  modified_base 282: mod_base = OTHER; note = uracil
  modified_base 284: mod_base = OTHER; note = uracil
  modified_base 297: mod_base = OTHER; note = uracil
  modified_base 128: mod_base = m5c
  modified_base 171: mod_base = m5c
  variation 150: note = CpG site, residue is C if methylated or T(=U) if unmethylated
gagaaataaaatatattttttaatttaaaaaaaagtattagaatgaataaaataggggttttttaaaattgtttttggtagatttagtaaatttattgaatttagaaatttttattttataattgttcggagatagaaagtagtgttttygaataagtggataattttgtcggttttagtaggtgttattggtgagtatatagggttgtttaagtttttaagttatttttttgattgtggtttgaattaatgttaaatatttataggggttaggtaggtaatttaatgaagtgaaatagg

SEQ ID NO: 152 - DNA, 300 bp, synthetic construct
  source 1..300: mol_type = other DNA
  modified_base 1: mod_base = OTHER; note = uracil
  modified_base 7: mod_base = OTHER; note = uracil
  modified_base 9: mod_base = OTHER; note = uracil
  modified_base 12: mod_base = OTHER; note = uracil
  modified_base 22..23: mod_base = OTHER; note = uracil
  modified_base 26..27: mod_base = OTHER; note = uracil
  modified_base 31..34: mod_base = OTHER; note = uracil
  modified_base 48: mod_base = OTHER; note = uracil
  modified_base 56: mod_base = OTHER; note = uracil
  modified_base 60..61: mod_base = OTHER; note = uracil
  modified_base 63: mod_base = OTHER; note = uracil
  modified_base 67: mod_base = OTHER; note = uracil
  modified_base 78: mod_base = OTHER; note = uracil
  modified_base 86: mod_base = OTHER; note = uracil
  modified_base 92: mod_base = OTHER; note = uracil
  modified_base 95..97: mod_base = OTHER; note = uracil
  modified_base 104: mod_base = OTHER; note = uracil
  modified_base 106: mod_base = OTHER; note = uracil
  modified_base 108..109: mod_base = OTHER; note = uracil
  modified_base 115: mod_base = OTHER; note = uracil
  modified_base 117..118: mod_base = OTHER; note = uracil
  modified_base 121: mod_base = OTHER; note = uracil
  modified_base 127: mod_base = OTHER; note = uracil
  modified_base 131: mod_base = OTHER; note = uracil
  modified_base 140..141: mod_base = OTHER; note = uracil
  modified_base 143: mod_base = OTHER; note = uracil
  modified_base 155: mod_base = OTHER; note = uracil
  modified_base 157: mod_base = OTHER; note = uracil
  modified_base 160: mod_base = OTHER; note = uracil
  modified_base 164: mod_base = OTHER; note = uracil
  modified_base 168: mod_base = OTHER; note = uracil
  modified_base 170: mod_base = OTHER; note = uracil
  modified_base 175: mod_base = OTHER; note = uracil
  modified_base 195: mod_base = OTHER; note = uracil
  modified_base 202: mod_base = OTHER; note = uracil
  modified_base 213: mod_base = OTHER; note = uracil
  modified_base 219: mod_base = OTHER; note = uracil
  modified_base 222..223: mod_base = OTHER; note = uracil
  modified_base 229: mod_base = OTHER; note = uracil
  modified_base 242..245: mod_base = OTHER; note = uracil
  modified_base 255: mod_base = OTHER; note = uracil
  modified_base 259: mod_base = OTHER; note = uracil
  modified_base 265: mod_base = OTHER; note = uracil
  modified_base 297: mod_base = OTHER; note = uracil
  modified_base 299: mod_base = OTHER; note = uracil
  modified_base 128: mod_base = m5c
  modified_base 171: mod_base = m5c
  variation 149: note = CpG site, residue is C if methylated or T(=U) if unmethylated
ttgttttattttattgagttatttgtttgatttttgtagatatttgatattgatttaaattatagttagggaaatgatttagagatttaagtaattttgtgtgtttattaatggtatttattgggatcggtagagttatttatttattyggaagtattgttttttattttcggataattataaaatgaaagtttttaagtttagtaggtttgttaaatttattaaaagtagttttggaaagtttttgttttatttattttggtatttttttttaaattaaaaaatgtattttgttttttt

SEQ ID NO: 153 - DNA, 300 bp, synthetic construct
  source 1..300: mol_type = other DNA
  modified_base 7: mod_base = OTHER; note = uracil
  modified_base 10: mod_base = OTHER; note = uracil
  modified_base 12: mod_base = OTHER; note = uracil
  modified_base 16: mod_base = OTHER; note = uracil
  modified_base 30..31: mod_base = OTHER; note = uracil
  modified_base 38: mod_base = OTHER; note = uracil
  modified_base 55: mod_base = OTHER; note = uracil
  modified_base 69: mod_base = OTHER; note = uracil
  modified_base 72..73: mod_base = OTHER; note = uracil
  modified_base 76: mod_base = OTHER; note = uracil
  modified_base 78..79: mod_base = OTHER; note = uracil
  modified_base 85..89: mod_base = OTHER; note = uracil
  modified_base 94: mod_base = OTHER; note = uracil
  modified_base 96..97: mod_base = OTHER; note = uracil
  modified_base 102..105: mod_base = OTHER; note = uracil
  modified_base 115..119: mod_base = OTHER; note = uracil
  modified_base 145: mod_base = OTHER; note = uracil
  modified_base 148: mod_base = OTHER; note = uracil
  modified_base 152..153: mod_base = OTHER; note = uracil
  modified_base 158: mod_base = OTHER; note = uracil
  modified_base 160..161: mod_base = OTHER; note = uracil
  modified_base 170..173: mod_base = OTHER; note = uracil
  modified_base 179: mod_base = OTHER; note = uracil
  modified_base 184: mod_base = OTHER; note = uracil
  modified_base 186..188: mod_base = OTHER; note = uracil
  modified_base 190..191: mod_base = OTHER; note = uracil
  modified_base 199..200: mod_base = OTHER; note = uracil
  modified_base 205: mod_base = OTHER; note = uracil
  modified_base 230: mod_base = OTHER; note = uracil
  modified_base 234..236: mod_base = OTHER; note = uracil
  modified_base 239: mod_base = OTHER; note = uracil
  modified_base 242: mod_base = OTHER; note = uracil
  modified_base 244: mod_base = OTHER; note = uracil
  modified_base 249..250: mod_base = OTHER; note = uracil
  modified_base 255..258: mod_base = OTHER; note = uracil
  modified_base 263..264: mod_base = OTHER; note = uracil
  modified_base 267: mod_base = OTHER; note = uracil
  modified_base 269..271: mod_base = OTHER; note = uracil
  modified_base 273: mod_base = OTHER; note = uracil
  modified_base 276: mod_base = OTHER; note = uracil
  modified_base 280..281: mod_base = OTHER; note = uracil
  modified_base 291..293: mod_base = OTHER; note = uracil
  modified_base 295: mod_base = OTHER; note = uracil
  modified_base 298: mod_base = OTHER; note = uracil
  modified_base 300: mod_base = OTHER; note = uracil
  modified_base 13: mod_base = m5c
  modified_base 19: mod_base = m5c
  modified_base 24: mod_base = m5c
  modified_base 28: mod_base = m5c
  modified_base 34: mod_base = m5c
  modified_base 39: mod_base = m5c
  modified_base 44: mod_base = m5c
  modified_base 56: mod_base = m5c
  modified_base 59: mod_base = m5c
  modified_base 61: mod_base = m5c
  modified_base 70: mod_base = m5c
  modified_base 82: mod_base = m5c
  modified_base 92: mod_base = m5c
  modified_base 98: mod_base = m5c
  modified_base 107: mod_base = m5c
  modified_base 109: mod_base = m5c
  modified_base 134: mod_base = m5c
  modified_base 138: mod_base = m5c
  modified_base 154: mod_base = m5c
  modified_base 164: mod_base = m5c
  modified_base 177: mod_base = m5c
  modified_base 180: mod_base = m5c
  modified_base 182: mod_base = m5c
  modified_base 192: mod_base = m5c
  modified_base 209: mod_base = m5c
  modified_base 213: mod_base = m5c
  modified_base 237: mod_base = m5c
  modified_base 253: mod_base = m5c
  modified_base 277: mod_base = m5c
  modified_base 283: mod_base = m5c
  modified_base 288: mod_base = m5c
  modified_base 296: mod_base = m5c
  variation 150: note = CpG site, residue is C if methylated or T(=U) if unmethylated
ggagggttttatcgttagcgtagcgtacgtttgcgggtcggggcgggagagggatcgtcgcgtttgtgtcgttagtatttgcggtttttagcgtattcgggttttacgcggtagtttttagggagtggggagtcgggcgggaaatagttygttcgggtttttacgggtgtttttttcgtcgcgttttttttcgagggttttttgtagtcgggcgtggaagtgggatgagtaaatttcgtagtatagggttttcgttttaggatttgtattttttatcggttacgggacgttttttcgtat

SEQ ID NO: 154 - DNA, 300 bp, synthetic construct
  source 1..300: mol_type = other DNA
  modified_base 15..16: mod_base = OTHER; note = uracil
  modified_base 22: mod_base = OTHER; note = uracil
  modified_base 35: mod_base = OTHER; note = uracil
  modified_base 40..41: mod_base = OTHER; note = uracil
  modified_base 53..55: mod_base = OTHER; note = uracil
  modified_base 60: mod_base = OTHER; note = uracil
  modified_base 72: mod_base = OTHER; note = uracil
  modified_base 74: mod_base = OTHER; note = uracil
  modified_base 77..79: mod_base = OTHER; note = uracil
  modified_base 81: mod_base = OTHER; note = uracil
  modified_base 84..85: mod_base = OTHER; note = uracil
  modified_base 89..90: mod_base = OTHER; note = uracil
  modified_base 94: mod_base = OTHER; note = uracil
  modified_base 97: mod_base = OTHER; note = uracil
  modified_base 104..106: mod_base = OTHER; note = uracil
  modified_base 132: mod_base = OTHER; note = uracil
  modified_base 134..135: mod_base = OTHER; note = uracil
  modified_base 144..145: mod_base = OTHER; note = uracil
  modified_base 154: mod_base = OTHER; note = uracil
  modified_base 160..161: mod_base = OTHER; note = uracil
  modified_base 164..165: mod_base = OTHER; note = uracil
  modified_base 169: mod_base = OTHER; note = uracil
  modified_base 171..174: mod_base = OTHER; note = uracil
  modified_base 176: mod_base = OTHER; note = uracil
  modified_base 178..180: mod_base = OTHER; note = uracil
  modified_base 187: mod_base = OTHER; note = uracil
  modified_base 190: mod_base = OTHER; note = uracil
  modified_base 200..201: mod_base = OTHER; note = uracil
  modified_base 210: mod_base = OTHER; note = uracil
  modified_base 217: mod_base = OTHER; note = uracil
  modified_base 220: mod_base = OTHER; note = uracil
  modified_base 226: mod_base = OTHER; note = uracil
  modified_base 233: mod_base = OTHER; note = uracil
  modified_base 235: mod_base = OTHER; note = uracil
  modified_base 248..250: mod_base = OTHER; note = uracil
  modified_base 252: mod_base = OTHER; note = uracil
  modified_base 254..255: mod_base = OTHER; note = uracil
  modified_base 258..260: mod_base = OTHER; note = uracil
  modified_base 264..265: mod_base = OTHER; note = uracil
  modified_base 268: mod_base = OTHER; note = uracil
  modified_base 278: mod_base = OTHER; note = uracil
  modified_base 283: mod_base = OTHER; note = uracil
  modified_base 295..297: mod_base = OTHER; note = uracil
  modified_base 299..300: mod_base = OTHER; note = uracil
  modified_base 4: mod_base = m5c
  modified_base 12: mod_base = m5c
  modified_base 17: mod_base = m5c
  modified_base 23: mod_base = m5c
  modified_base 47: mod_base = m5c
  modified_base 63: mod_base = m5c
  modified_base 87: mod_base = m5c
  modified_base 91: mod_base = m5c
  modified_base 108: mod_base = m5c
  modified_base 118: mod_base = m5c
  modified_base 120: mod_base = m5c
  modified_base 123: mod_base = m5c
  modified_base 136: mod_base = m5c
  modified_base 146: mod_base = m5c
  modified_base 162: mod_base = m5c
  modified_base 166: mod_base = m5c
  modified_base 191: mod_base = m5c
  modified_base 193: mod_base = m5c
  modified_base 202: mod_base = m5c
  modified_base 208: mod_base = m5c
  modified_base 218: mod_base = m5c
  modified_base 230: mod_base = m5c
  modified_base 239: mod_base = m5c
  modified_base 241: mod_base = m5c
  modified_base 244: mod_base = m5c
  modified_base 256: mod_base = m5c
  modified_base 261: mod_base = m5c
  modified_base 266: mod_base = m5c
  modified_base 272: mod_base = m5c
  modified_base 276: mod_base = m5c
  modified_base 281: mod_base = m5c
  modified_base 287: mod_base = m5c
  variation 150: note = CpG site, residue is C if methylated or T(=U) if unmethylated
gtgcggagggacgtttcgtggtcggtagagggtgtaggttttggggcgaaggttttgtgttgcggggtttgtttattttatttttacgttcgattgtaaaggattttcgggagggagcgcggcgaaaggggtattcgtaggagttcgggygagttgtttttcgttcgattttttattttttgggggttatcgcgtggggttcgggtgcgttgggggtcgtaggtgttggcggtataaacgcgacggtttttttttcgtttcggttcgtaggcgtacgttacgttgacggtgaagtttttt

SEQ ID NO: 155 - DNA, 300 bp, synthetic construct
  source 1..300: mol_type = other DNA
  modified_base 4: mod_base = OTHER; note = uracil
  modified_base 6: mod_base = OTHER; note = uracil
  modified_base 23: mod_base = OTHER; note = uracil
  modified_base 27: mod_base = OTHER; note = uracil
  modified_base 29: mod_base = OTHER; note = uracil
  modified_base 43: mod_base = OTHER; note = uracil
  modified_base 51: mod_base = OTHER; note = uracil
  modified_base 67: mod_base = OTHER; note = uracil
  modified_base 72..73: mod_base = OTHER; note = uracil
  modified_base 94: mod_base = OTHER; note = uracil
  modified_base 97: mod_base = OTHER; note = uracil
  modified_base 101: mod_base = OTHER; note = uracil
  modified_base 108: mod_base = OTHER; note = uracil
  modified_base 114: mod_base = OTHER; note = uracil
  modified_base 119: mod_base = OTHER; note = uracil
  modified_base 122..123: mod_base = OTHER; note = uracil
  modified_base 130: mod_base = OTHER; note = uracil
  modified_base 135: mod_base = OTHER; note = uracil
  modified_base 139..140: mod_base = OTHER; note = uracil
  modified_base 148: mod_base = OTHER; note = uracil
  modified_base 156: mod_base = OTHER; note = uracil
  modified_base 164..165: mod_base = OTHER; note = uracil
  modified_base 169: mod_base = OTHER; note = uracil
  modified_base 176..178: mod_base = OTHER; note = uracil
  modified_base 181: mod_base = OTHER; note = uracil
  modified_base 184..186: mod_base = OTHER; note = uracil
  modified_base 190..191: mod_base = OTHER; note = uracil
  modified_base 199: mod_base = OTHER; note = uracil
  modified_base 210..211: mod_base = OTHER; note = uracil
  modified_base 214..215: mod_base = OTHER; note = uracil
  modified_base 219: mod_base = OTHER; note = uracil
  modified_base 224: mod_base = OTHER; note = uracil
  modified_base 229: mod_base = OTHER; note = uracil
  modified_base 240..241: mod_base = OTHER; note = uracil
  modified_base 249..250: mod_base = OTHER; note = uracil
  modified_base 272: mod_base = OTHER; note = uracil
  modified_base 278: mod_base = OTHER; note = uracil
  modified_base 281..282: mod_base = OTHER; note = uracil
  modified_base 300: mod_base = OTHER; note = uracil
  modified_base 15: mod_base = m5c
  modified_base 46: mod_base = m5c
  modified_base 60: mod_base = m5c
  modified_base 68: mod_base = m5c
  modified_base 89: mod_base = m5c
  modified_base 95: mod_base = m5c
  modified_base 104: mod_base = m5c
  modified_base 115: mod_base = m5c
  modified_base 117: mod_base = m5c
  modified_base 136: mod_base = m5c
  modified_base 141: mod_base = m5c
  modified_base 154: mod_base = m5c
  modified_base 174: mod_base = m5c
  modified_base 182: mod_base = m5c
  modified_base 187: mod_base = m5c
  modified_base 225: mod_base = m5c
  modified_base 251: mod_base = m5c
  modified_base 256: mod_base = m5c
  modified_base 262: mod_base = m5c
  modified_base 266: mod_base = m5c
  modified_base 290: mod_base = m5c
  modified_base 294: mod_base = m5c
  variation 150: note = CpG site, residue is C if methylated or T(=U) if unmethylated
agatataaagagggcggagagatagatatagaaagagggagatagcggggttggatggacgtgtggtcgggttagtggggaggagagacgagttcgtagatagcgtttagaggtcgcgttgtttgggtgttgagtcgtttcggggtttayggtcgtagtttgtttttataaaacgtttagtcgtttcgatttgtggtgtttagggaggatttatttggttgtgtcggtttgagaaggggttagtgaggttcggtgcgggtacgggcgggtgtagatgtagttaggaggacgggcgggagt

SEQ ID NO: 156 - DNA, 300 bp, synthetic construct
  source 1..300: mol_type = other DNA
  modified_base 2: mod_base = OTHER; note = uracil
  modified_base 4..5: mod_base = OTHER; note = uracil
  modified_base 8..9: mod_base = OTHER; note = uracil
  modified_base 13..14: mod_base = OTHER; note = uracil
  modified_base 16..17: mod_base = OTHER; note = uracil
  modified_base 21: mod_base = OTHER; note = uracil
  modified_base 24: mod_base = OTHER; note = uracil
  modified_base 27: mod_base = OTHER; note = uracil
  modified_base 30: mod_base = OTHER; note = uracil
  modified_base 32..33: mod_base = OTHER; note = uracil
  modified_base 36..37: mod_base = OTHER; note = uracil
  modified_base 42..43: mod_base = OTHER; note = uracil
  modified_base 46: mod_base = OTHER; note = uracil
  modified_base 48: mod_base = OTHER; note = uracil
  modified_base 53..54: mod_base = OTHER; note = uracil
  modified_base 56: mod_base = OTHER; note = uracil
  modified_base 58: mod_base = OTHER; note = uracil
  modified_base 62..65: mod_base = OTHER; note = uracil
  modified_base 68: mod_base = OTHER; note = uracil
  modified_base 70: mod_base = OTHER; note = uracil
  modified_base 74: mod_base = OTHER; note = uracil
  modified_base 78: mod_base = OTHER; note = uracil
  modified_base 80: mod_base = OTHER; note = uracil
  modified_base 83..84: mod_base = OTHER; note = uracil
  modified_base 93..94: mod_base = OTHER; note = uracil
  modified_base 96..98: mod_base = OTHER; note = uracil
  modified_base 103: mod_base = OTHER; note = uracil
  modified_base 105..106: mod_base = OTHER; note = uracil
  modified_base 108: mod_base = OTHER; note = uracil
  modified_base 121: mod_base = OTHER; note = uracil
  modified_base 139: mod_base = OTHER; note = uracil
  modified_base 143: mod_base = OTHER; note = uracil
  modified_base 149: mod_base = OTHER; note = uracil
  modified_base 156..158: mod_base = OTHER; note = uracil
  modified_base 167: mod_base = OTHER; note = uracil
  modified_base 169: mod_base = OTHER; note = uracil
  modified_base 172: mod_base = OTHER; note = uracil
  modified_base 174..176: mod_base = OTHER; note = uracil
  modified_base 180: mod_base = OTHER; note = uracil
  modified_base 188..189: mod_base = OTHER; note = uracil
  modified_base 191: mod_base = OTHER; note = uracil
  modified_base 198: mod_base = OTHER; note = uracil
  modified_base 202: mod_base = OTHER; note = uracil
  modified_base 209: mod_base = OTHER; note = uracil
  modified_base 214: mod_base = OTHER; note = uracil
  modified_base 216: mod_base = OTHER; note = uracil
  modified_base 218..219: mod_base = OTHER; note = uracil
  modified_base 221..224: mod_base = OTHER; note = uracil
  modified_base 226: mod_base = OTHER; note = uracil
  modified_base 230..231: mod_base = OTHER; note = uracil
  modified_base 235..236: mod_base = OTHER; note = uracil
  modified_base 238: mod_base = OTHER; note = uracil
  modified_base 243..244: mod_base = OTHER; note = uracil
  modified_base 247..248: mod_base = OTHER; note = uracil
  modified_base 251..253: mod_base = OTHER; note = uracil
  modified_base 256: mod_base = OTHER; note = uracil
  modified_base 260: mod_base = OTHER; note = uracil
  modified_base 262..264: mod_base = OTHER; note = uracil
  modified_base 266: mod_base = OTHER; note = uracil
  modified_base 270: mod_base = OTHER; note = uracil
  modified_base 276: mod_base = OTHER; note = uracil
  modified_base 280: mod_base = OTHER; note = uracil
  modified_base 282: mod_base = OTHER; note = uracil
  modified_base 284: mod_base = OTHER; note = uracil
  modified_base 287..289: mod_base = OTHER; note = uracil
  modified_base 291: mod_base = OTHER; note = uracil
  modified_base 299: mod_base = OTHER; note = uracil
  modified_base 6: mod_base = m5c
  modified_base 10: mod_base = m5c
  modified_base 34: mod_base = m5c
  modified_base 38: mod_base = m5c
  modified_base 44: mod_base = m5c
  modified_base 49: mod_base = m5c
  modified_base 75: mod_base = m5c
  modified_base 113: mod_base = m5c
  modified_base 118: mod_base = m5c
  modified_base 126: mod_base = m5c
  modified_base 146: mod_base = m5c
  modified_base 159: mod_base = m5c
  modified_base 164: mod_base = m5c
  modified_base 183: mod_base = m5c
  modified_base 185: mod_base = m5c
  modified_base 196: mod_base = m5c
  modified_base 205: mod_base = m5c
  modified_base 211: mod_base = m5c
  modified_base 232: mod_base = m5c
  modified_base 240: mod_base = m5c
  modified_base 254: mod_base = m5c
  modified_base 285: mod_base = m5c
  variation 150: note = CpG site, residue is C if methylated or T(=U) if unmethylated
gttttcgttcgtttttttggttgtatttgtattcgttcgtattcgtatcgggttttattggtttttttttagatcggtatagttaggtaggttttttttaagtattataggtcggggcggttgggcgttttgtaaggataaattgcgatygtgaatttcgggacggtttagtatttaggtagcgcggtttttgaacgttgtttgcggattcgttttttttttttattggttcggttatacgtttatttagtttcgttgtttttttttttttgtgtttgttttttcgttttttttgtgttt

SEQ ID NO: 157 - DNA, 300 bp, synthetic construct
  source 1..300: mol_type = other DNA
  modified_base 2: mod_base = OTHER; note = uracil
  modified_base 6: mod_base = OTHER; note = uracil
  modified_base 8: mod_base = OTHER; note = uracil
  modified_base 10: mod_base = OTHER; note = uracil
  modified_base 15: mod_base = OTHER; note = uracil
  modified_base 23: mod_base = OTHER; note = uracil
  modified_base 25: mod_base = OTHER; note = uracil
  modified_base 45: mod_base = OTHER; note = uracil
  modified_base 50: mod_base = OTHER; note = uracil
  modified_base 59: mod_base = OTHER; note = uracil
  modified_base 61: mod_base = OTHER; note = uracil
  modified_base 67: mod_base = OTHER; note = uracil
  modified_base 69: mod_base = OTHER; note = uracil
  modified_base 74..75: mod_base = OTHER; note = uracil
  modified_base 77: mod_base = OTHER; note = uracil
  modified_base 83: mod_base = OTHER; note = uracil
  modified_base 85..86: mod_base = OTHER; note = uracil
  modified_base 93: mod_base = OTHER; note = uracil
  modified_base 101..104: mod_base = OTHER; note = uracil
  modified_base 107: mod_base = OTHER; note = uracil
  modified_base 112: mod_base = OTHER; note = uracil
  modified_base 114: mod_base = OTHER; note = uracil
  modified_base 117: mod_base = OTHER; note = uracil
  modified_base 125..126: mod_base = OTHER; note = uracil
  modified_base 128: mod_base = OTHER; note = uracil
  modified_base 130: mod_base = OTHER; note = uracil
  modified_base 137: mod_base = OTHER; note = uracil
  modified_base 140: mod_base = OTHER; note = uracil
  modified_base 142..143: mod_base = OTHER; note = uracil
  modified_base 146: mod_base = OTHER; note = uracil
  modified_base 149: mod_base = OTHER; note = uracil
  modified_base 152..153: mod_base = OTHER; note = uracil
  modified_base 160: mod_base = OTHER; note = uracil
  modified_base 162: mod_base = OTHER; note = uracil
  modified_base 164: mod_base = OTHER; note = uracil
  modified_base 167: mod_base = OTHER; note = uracil
  modified_base 171: mod_base = OTHER; note = uracil
  modified_base 173..174: mod_base = OTHER; note = uracil
  modified_base 177: mod_base = OTHER; note = uracil
  modified_base 179..181: mod_base = OTHER; note = uracil
  modified_base 183: mod_base = OTHER; note = uracil
  modified_base 185: mod_base = OTHER; note = uracil
  modified_base 187..188: mod_base = OTHER; note = uracil
  modified_base 191: mod_base = OTHER; note = uracil
  modified_base 194..195: mod_base = OTHER; note = uracil
  modified_base 197..201: mod_base = OTHER; note = uracil
  modified_base 203..205: mod_base = OTHER; note = uracil
  modified_base 221: mod_base = OTHER; note = uracil
  modified_base 242..243: mod_base = OTHER; note = uracil
  modified_base 256..257: mod_base = OTHER; note = uracil
  modified_base 263: mod_base = OTHER; note = uracil
  modified_base 267: mod_base = OTHER; note = uracil
  modified_base 271: mod_base = OTHER; note = uracil
  modified_base 275: mod_base = OTHER; note = uracil
  modified_base 280: mod_base = OTHER; note = uracil
  modified_base 287: mod_base = OTHER; note = uracil
  modified_base 289: mod_base = OTHER; note = uracil
  modified_base 298: mod_base = OTHER; note = uracil
  modified_base 87: mod_base = m5c
  modified_base 118: mod_base = m5c
  modified_base 154: mod_base = m5c
  modified_base 207: mod_base = m5c
  variation 150: note = CpG site, residue is C if methylated or T(=U) if unmethylated
gttgttatattgagttgtttaatatttaagatgttggtggatggtaaagttaaaagagtattgtaatatatgatttttggggttttcggagttatgagtattttttttagatatagtcgtggggttatatagaattttgtttttgttgtygttcggaagtatttatttggtttttgtatttatttatttgtatttttttttttttacgaggtgttaagagttgtgggatgagtaaaggaggtttgtgaaggattttttgttttagttttatatttaggtttgagtttttagaggaatttt

SEQ ID NO: 158 - DNA, 300 bp, synthetic construct
  source 1..300: mol_type = other DNA
  modified_base 7..8: mod_base = OTHER; note = uracil
  modified_base 10: mod_base = OTHER; note = uracil
  modified_base 17: mod_base = OTHER; note = uracil
  modified_base 19: mod_base = OTHER; note = uracil
  modified_base 23..24: mod_base = OTHER; note = uracil
  modified_base 36: mod_base = OTHER; note = uracil
  modified_base 42: mod_base = OTHER; note = uracil
  modified_base 50..51: mod_base = OTHER; note = uracil
  modified_base 54: mod_base = OTHER; note = uracil
  modified_base 56: mod_base = OTHER; note = uracil
  modified_base 60..61: mod_base = OTHER; note = uracil
  modified_base 63..64: mod_base = OTHER; note = uracil
  modified_base 69: mod_base = OTHER; note = uracil
  modified_base 71: mod_base = OTHER; note = uracil
  modified_base 74..76: mod_base = OTHER; note = uracil
  modified_base 78: mod_base = OTHER; note = uracil
  modified_base 81: mod_base = OTHER; note = uracil
  modified_base 83: mod_base = OTHER; note = uracil
  modified_base 88: mod_base = OTHER; note = uracil
  modified_base 90..91: mod_base = OTHER; note = uracil
  modified_base 111: mod_base = OTHER; note = uracil
  modified_base 125: mod_base = OTHER; note = uracil
  modified_base 131..132: mod_base = OTHER; note = uracil
  modified_base 142: mod_base = OTHER; note = uracil
  modified_base 145: mod_base = OTHER; note = uracil
  modified_base 153: mod_base = OTHER; note = uracil
  modified_base 156: mod_base = OTHER; note = uracil
  modified_base 162: mod_base = OTHER; note = uracil
  modified_base 169: mod_base = OTHER; note = uracil
  modified_base 177..180: mod_base = OTHER; note = uracil
  modified_base 185: mod_base = OTHER; note = uracil
  modified_base 191: mod_base = OTHER; note = uracil
  modified_base 203: mod_base = OTHER; note = uracil
  modified_base 205: mod_base = OTHER; note = uracil
  modified_base 210: mod_base = OTHER; note = uracil
  modified_base 212: mod_base = OTHER; note = uracil
  modified_base 219..222: mod_base = OTHER; note = uracil
  modified_base 229: mod_base = OTHER; note = uracil
  modified_base 238: mod_base = OTHER; note = uracil
  modified_base 243: mod_base = OTHER; note = uracil
  modified_base 245: mod_base = OTHER; note = uracil
  modified_base 252: mod_base = OTHER; note = uracil
  modified_base 257..258: mod_base = OTHER; note = uracil
  modified_base 261..262: mod_base = OTHER; note = uracil
  modified_base 264..265: mod_base = OTHER; note = uracil
  modified_base 268: mod_base = OTHER; note = uracil
  modified_base 271: mod_base = OTHER; note = uracil
  modified_base 284: mod_base = OTHER; note = uracil
  modified_base 287: mod_base = OTHER; note = uracil
  modified_base 289: mod_base = OTHER; note = uracil
  modified_base 297: mod_base = OTHER; note = uracil
  modified_base 300: mod_base = OTHER; note = uracil
  modified_base 93: mod_base = m5c
  modified_base 146: mod_base = m5c
  modified_base 182: mod_base = m5c
  modified_base 213: mod_base = m5c
  variation 150: note = CpG site, residue is C if methylated or T(=U) if unmethylated
aagatttttttgagaatttagatttgaatgtaagattgaaataggaaattttttataggttttttttatttattttatagtttttaatatttcgtgggagggggaggatgtaggtgagtgggtgtaggagttagatgagtgttttcgggyggtagtaggagtagaattttgtgtggttttacggttgtgtttagaaggggtatttatgatttcgggagttttagaggttatgtgttatagtgtttttttagttttgttatttattaatattttaagtgttaaatagtttagtgtgatagt

SEQ ID NO: 159 - DNA, 300 bp, synthetic construct
  source 1..300: mol_type = other DNA
  modified_base 1: mod_base = OTHER; note = uracil
  modified_base 6: mod_base = OTHER; note = uracil
  modified_base 24: mod_base = OTHER; note = uracil
  modified_base 34..35: mod_base = OTHER; note = uracil
  modified_base 40..41: mod_base = OTHER; note = uracil
  modified_base 43: mod_base = OTHER; note = uracil
  modified_base 52: mod_base = OTHER; note = uracil
  modified_base 55..56: mod_base = OTHER; note = uracil
  modified_base 60: mod_base = OTHER; note = uracil
  modified_base 64: mod_base = OTHER; note = uracil
  modified_base 67: mod_base = OTHER; note = uracil
  modified_base 72..74: mod_base = OTHER; note = uracil
  modified_base 79: mod_base = OTHER; note = uracil
  modified_base 92: mod_base = OTHER; note = uracil
  modified_base 94: mod_base = OTHER; note = uracil
  modified_base 99: mod_base = OTHER; note = uracil
  modified_base 111: mod_base = OTHER; note = uracil
  modified_base 116..118: mod_base = OTHER; note = uracil
  modified_base 141..142: mod_base = OTHER; note = uracil
  modified_base 146..147: mod_base = OTHER; note = uracil
  modified_base 152: mod_base = OTHER; note = uracil
  modified_base 156: mod_base = OTHER; note = uracil
  modified_base 158: mod_base = OTHER; note = uracil
  modified_base 177: mod_base = OTHER; note = uracil
  modified_base 179: mod_base = OTHER; note = uracil
  modified_base 181..183: mod_base = OTHER; note = uracil
  modified_base 185: mod_base = OTHER; note = uracil
  modified_base 187: mod_base = OTHER; note = uracil
  modified_base 194: mod_base = OTHER; note = uracil
  modified_base 197..199: mod_base = OTHER; note = uracil
  modified_base 201: mod_base = OTHER; note = uracil
  modified_base 204..205: mod_base = OTHER; note = uracil
  modified_base 207: mod_base = OTHER; note = uracil
  modified_base 214..215: mod_base = OTHER; note = uracil
  modified_base 217: mod_base = OTHER; note = uracil
  modified_base 222: mod_base = OTHER; note = uracil
  modified_base 224..226: mod_base = OTHER; note = uracil
  modified_base 232..235: mod_base = OTHER; note = uracil
  modified_base 238..241: mod_base = OTHER; note = uracil
  modified_base 249..250: mod_base = OTHER; note = uracil
  modified_base 253..254: mod_base = OTHER; note = uracil
  modified_base 260: mod_base = OTHER; note = uracil
  modified_base 262..263: mod_base = OTHER; note = uracil
  modified_base 265: mod_base = OTHER; note = uracil
  modified_base 267..268: mod_base = OTHER; note = uracil
  modified_base 272: mod_base = OTHER; note = uracil
  modified_base 275..279: mod_base = OTHER; note = uracil
  modified_base 281..283: mod_base = OTHER; note = uracil
  modified_base 285: mod_base = OTHER; note = uracil
  modified_base 288: mod_base = OTHER; note = uracil
  modified_base 291: mod_base = OTHER; note = uracil
  modified_base 293: mod_base = OTHER; note = uracil
  modified_base 27: mod_base = m5c
  modified_base 119: mod_base = m5c
  modified_base 269: mod_base = m5c
  modified_base 273: mod_base = m5c
  modified_base 289: mod_base = m5c
  variation 149: note = CpG site, residue is C if methylated or T(=U) if unmethylated
tagggttgggagaataggatggatagcgttttgttagagttttatgggaagtttttttttaggtagttgaatttattttaggggtagggagtattgattaggggttgggatattgtttcgggaggaggatgaggatgtttttaggtttyggttgatttatggtagtgagtattagttatttttttataagaattagtttatattttttagtagttttttgttttttagaggtttttgttttatgtttatttgtttgaagtttttttttcggtcgtttttatttatattcgtatagtttgg

SEQ ID NO: 160 - DNA, 300 bp, synthetic construct
  source 1..300: mol_type = other DNA
  modified_base 1: mod_base = OTHER; note = uracil
  modified_base 5: mod_base = OTHER; note = uracil
  modified_base 29: mod_base = OTHER; note = uracil
  modified_base 41: mod_base = OTHER; note = uracil
  modified_base 44: mod_base = OTHER; note = uracil
  modified_base 48: mod_base = OTHER; note = uracil
  modified_base 56: mod_base = OTHER; note = uracil
  modified_base 63: mod_base = OTHER; note = uracil
  modified_base 69..70: mod_base = OTHER; note = uracil
  modified_base 72: mod_base = OTHER; note = uracil
  modified_base 80: mod_base = OTHER; note = uracil
  modified_base 87: mod_base = OTHER; note = uracil
  modified_base 90: mod_base = OTHER; note = uracil
  modified_base 104: mod_base = OTHER; note = uracil
  modified_base 110: mod_base = OTHER; note = uracil
  modified_base 125: mod_base = OTHER; note = uracil
  modified_base 131: mod_base = OTHER; note = uracil
  modified_base 133: mod_base = OTHER; note = uracil
  modified_base 135: mod_base = OTHER; note = uracil
  modified_base 138..139: mod_base = OTHER; note = uracil
  modified_base 146: mod_base = OTHER; note = uracil
  modified_base 149: mod_base = OTHER; note = uracil
  modified_base 155..156: mod_base = OTHER; note = uracil
  modified_base 163: mod_base = OTHER; note = uracil
  modified_base 166..167: mod_base = OTHER; note = uracil
  modified_base 169: mod_base = OTHER; note = uracil
  modified_base 172..173: mod_base = OTHER; note = uracil
  modified_base 175..176: mod_base = OTHER; note = uracil
  modified_base 178..179: mod_base = OTHER; note = uracil
  modified_base 185: mod_base = OTHER; note = uracil
  modified_base 191..193: mod_base = OTHER; note = uracil
  modified_base 196..199: mod_base = OTHER; note = uracil
  modified_base 204: mod_base = OTHER; note = uracil
  modified_base 209: mod_base = OTHER; note = uracil
  modified_base 211..213: mod_base = OTHER; note = uracil
  modified_base 216..219: mod_base = OTHER; note = uracil
  modified_base 231: mod_base = OTHER; note = uracil
  modified_base 234: mod_base = OTHER; note = uracil
  modified_base 237..238: mod_base = OTHER; note = uracil
  modified_base 249: mod_base = OTHER; note = uracil
  modified_base 252..254: mod_base = OTHER; note = uracil
  modified_base 261: mod_base = OTHER; note = uracil
  modified_base 263: mod_base = OTHER; note = uracil
  modified_base 267: mod_base = OTHER; note = uracil
  modified_base 274: mod_base = OTHER; note = uracil
  modified_base 278..279: mod_base = OTHER; note = uracil
  modified_base 282..283: mod_base = OTHER; note = uracil
  modified_base 288: mod_base = OTHER; note = uracil
  modified_base 290..292: mod_base = OTHER; note = uracil
  modified_base 295..297: mod_base = OTHER; note = uracil
  modified_base 300: mod_base = OTHER; note = uracil
  modified_base 10: mod_base = m5c
  modified_base 26: mod_base = m5c
  modified_base 30: mod_base = m5c
  modified_base 180: mod_base = m5c
  modified_base 272: mod_base = m5c
  variation 150: note = CpG site, residue is C if methylated or T(=U) if unmethylated
taaattgtgcggatgtgggtgggggcggtcgggagaggagttttaggtaggtaaatatggggtaggggtttttgggagataagaggttattagaggatgtgggttgatttttgtgagggagtgattaatatttattattatgagttagtygaggtttggaaatatttttatttttttttcggggtaatgttttaatttttgattagtgttttttatttttgaaatgggtttagttgtttgaaaggaagttttttatgaggttttggtaaaacgttgtttattttatttttttagttttgt

SEQ ID NO: 161 - DNA, 300 bp, synthetic construct
  source 1..300: mol_type = other DNA
  modified_base 6: mod_base = OTHER; note = uracil
  modified_base 16..17: mod_base = OTHER; note = uracil
  modified_base 25: mod_base = OTHER; note = uracil
  modified_base 30: mod_base = OTHER; note = uracil
  modified_base 37: mod_base = OTHER; note = uracil
  modified_base 39: mod_base = OTHER; note = uracil
  modified_base 52: mod_base = OTHER; note = uracil
  modified_base 79: mod_base = OTHER; note = uracil
  modified_base 85: mod_base = OTHER; note = uracil
  modified_base 95: mod_base = OTHER; note = uracil
  modified_base 112: mod_base = OTHER; note = uracil
  modified_base 114: mod_base = OTHER; note = uracil
  modified_base 129: mod_base = OTHER; note = uracil
  modified_base 142: mod_base = OTHER; note = uracil
  modified_base 144: mod_base = OTHER; note = uracil
  modified_base 148..149: mod_base = OTHER; note = uracil
  modified_base 156: mod_base = OTHER; note = uracil
  modified_base 161: mod_base = OTHER; note = uracil
  modified_base 163: mod_base = OTHER; note = uracil
  modified_base 173..174: mod_base = OTHER; note = uracil
  modified_base 183: mod_base = OTHER; note = uracil
  modified_base 188: mod_base = OTHER; note = uracil
  modified_base 196: mod_base = OTHER; note = uracil
  modified_base 210: mod_base = OTHER; note = uracil
  modified_base 213..214: mod_base = OTHER; note = uracil
  modified_base 218..219: mod_base = OTHER; note = uracil
  modified_base 222: mod_base = OTHER; note = uracil
  modified_base 229: mod_base = OTHER; note = uracil
  modified_base 232..234: mod_base = OTHER; note = uracil
  modified_base 238: mod_base = OTHER; note = uracil
  modified_base 240: mod_base = OTHER; note = uracil
  modified_base 243: mod_base = OTHER; note = uracil
  modified_base 252: mod_base = OTHER; note = uracil
  modified_base 262: mod_base = OTHER; note = uracil
  modified_base 279..280: mod_base = OTHER; note = uracil
  modified_base 287..289: mod_base = OTHER; note = uracil
  modified_base 292: mod_base = OTHER; note = uracil
  modified_base 295: mod_base = OTHER; note = uracil
  modified_base 297: mod_base = OTHER; note = uracil
  modified_base 130: mod_base = m5c
  modified_base 134: mod_base = m5c
  modified_base 190: mod_base = m5c
  modified_base 235: mod_base = m5c
  modified_base 263: mod_base = m5c
  variation 146: note = CpG site, residue is C if methylated or T(=U) if unmethylated
  variation 157: note = CpG site, residue is C if methylated or T(=U) if unmethylated
gaggattaaaagaagttagagatgttggttaattgatataaaaataaagagttaagggagaggttgagagagggagagtaatatttatgggtgtttggaatttttaaagggtttagaggaggagggggtcgggcgtggtggtttaygtttgttattygagtattttgggaggttaaggtgggtaaattacgaggttaggagtttgagagtagtttgattaatatggtgtaatttcgtttttattaaaaatataaaatttagtcgggtgtggttgtgtgtttgtaattttagttatttagg

SEQ ID NO: 162 - DNA, 300 bp, synthetic construct
  source 1..300: mol_type = other DNA
  modified_base 1..2: mod_base = OTHER; note = uracil
  modified_base 10: mod_base = OTHER; note = uracil
  modified_base 19: mod_base = OTHER; note = uracil
  modified_base 23: mod_base = OTHER; note = uracil
  modified_base 25: mod_base = OTHER; note = uracil
  modified_base 27: mod_base = OTHER; note = uracil
  modified_base 30..31: mod_base = OTHER; note = uracil
  modified_base 33: mod_base = OTHER; note = uracil
  modified_base 35..36: mod_base = OTHER; note = uracil
  modified_base 40: mod_base = OTHER; note = uracil
  modified_base 73: mod_base = OTHER; note = uracil
  modified_base 75..76: mod_base = OTHER; note = uracil
  modified_base 85: mod_base = OTHER; note = uracil
  modified_base 89: mod_base = OTHER; note = uracil
  modified_base 92: mod_base = OTHER; note = uracil
  modified_base 94: mod_base = OTHER; note = uracil
  modified_base 96: mod_base = OTHER; note = uracil
  modified_base 100: mod_base = OTHER; note = uracil
  modified_base 102..103: mod_base = OTHER; note = uracil
  modified_base 107..108: mod_base = OTHER; note = uracil
  modified_base 119..121: mod_base = OTHER; note = uracil
  modified_base 123..124: mod_base = OTHER; note = uracil
  modified_base 129..130: mod_base = OTHER; note = uracil
  modified_base 132..134: mod_base = OTHER; note = uracil
  modified_base 141: mod_base = OTHER; note = uracil
  modified_base 150: mod_base = OTHER; note = uracil
  modified_base 160..161: mod_base = OTHER; note = uracil
  modified_base 163..164: mod_base = OTHER; note = uracil
  modified_base 168..169: mod_base = OTHER; note = uracil
  modified_base 173..177: mod_base = OTHER; note = uracil
  modified_base 179..180: mod_base = OTHER; note = uracil
  modified_base 182..183: mod_base = OTHER; note = uracil
  modified_base 185: mod_base = OTHER; note = uracil
  modified_base 190..192: mod_base = OTHER; note = uracil
  modified_base 203..204: mod_base = OTHER; note = uracil
  modified_base 208: mod_base = OTHER; note = uracil
  modified_base 210..212: mod_base = OTHER; note = uracil
  modified_base 223: mod_base = OTHER; note = uracil
  modified_base 225: mod_base = OTHER; note = uracil
  modified_base 227..229: mod_base = OTHER; note = uracil
  modified_base 231: mod_base = OTHER; note = uracil
  modified_base 233: mod_base = OTHER; note = uracil
  modified_base 235: mod_base = OTHER; note = uracil
  modified_base 238..239: mod_base = OTHER; note = uracil
  modified_base 241: mod_base = OTHER; note = uracil
  modified_base 243..245: mod_base = OTHER; note = uracil
  modified_base 250: mod_base = OTHER; note = uracil
  modified_base 252: mod_base = OTHER; note = uracil
  modified_base 266: mod_base = OTHER; note = uracil
  modified_base 273..274: mod_base = OTHER; note = uracil
  modified_base 277: mod_base = OTHER; note = uracil
  modified_base 280: mod_base = OTHER; note = uracil
  modified_base 282: mod_base = OTHER; note = uracil
  modified_base 286: mod_base = OTHER; note = uracil
  modified_base 289: mod_base = OTHER; note = uracil
  modified_base 297..298: mod_base = OTHER; note = uracil
  modified_base 300: mod_base = OTHER; note = uracil
  modified_base 37: mod_base = m5c
  modified_base 65: mod_base = m5c
  modified_base 110: mod_base = m5c
  modified_base 166: mod_base = m5c
  modified_base 170: mod_base = m5c
  variation 143: note = CpG site, residue is C if methylated or T(=U) if unmethylated
  variation 154: note = CpG site, residue is C if methylated or T(=U) if unmethylated
tttgagtagttgggattataggtatataattatattcggttaaattttgtatttttagtagagacggggttgtattatgttggttaggttgtttttaaatttttgatttcgtgatttgtttattttggttttttaaagtgttyggataataggygtgagttattacgttcggttttttttttttttgagttttttaaaaattttagatatttatagatattgtttttttttttttaattttttttttagttttttatttttgtgttaattgattagtatttttggttttttttagttttt

SEQ ID NO: 163 - DNA, 300 bp, synthetic construct
  source 1..300: mol_type = other DNA
  modified_base 1..2: mod_base = OTHER; note = uracil
  modified_base 8..9: mod_base = OTHER; note = uracil
  modified_base 12..13: mod_base = OTHER; note = uracil
  modified_base 24: mod_base = OTHER; note = uracil
  modified_base 29: mod_base = OTHER; note = uracil
  modified_base 31: mod_base = OTHER; note = uracil
  modified_base 38: mod_base = OTHER; note = uracil
  modified_base 45: mod_base = OTHER; note = uracil
  modified_base 48: mod_base = OTHER; note = uracil
  modified_base 51: mod_base = OTHER; note = uracil
  modified_base 56..58: mod_base = OTHER; note = uracil
  modified_base 62: mod_base = OTHER; note = uracil
  modified_base 66: mod_base = OTHER; note = uracil
  modified_base 75: mod_base = OTHER; note = uracil
  modified_base 86: mod_base = OTHER; note = uracil
  modified_base 88..89: mod_base = OTHER; note = uracil
  modified_base 93..94: mod_base = OTHER; note = uracil
  modified_base 96..97: mod_base = OTHER; note = uracil
  modified_base 101..103: mod_base = OTHER; note = uracil
  modified_base 109..112: mod_base = OTHER; note = uracil
  modified_base 119: mod_base = OTHER; note = uracil
  modified_base 122: mod_base = OTHER; note = uracil
  modified_base 134..136: mod_base = OTHER; note = uracil
  modified_base 138..139: mod_base = OTHER; note = uracil
  modified_base 157: mod_base = OTHER; note = uracil
  modified_base 169..170: mod_base = OTHER; note = uracil
  modified_base 172: mod_base = OTHER; note = uracil
  modified_base 174..176: mod_base = OTHER; note = uracil
  modified_base 182..183: mod_base = OTHER; note = uracil
  modified_base 185: mod_base = OTHER; note = uracil
  modified_base 188: mod_base = OTHER; note = uracil
  modified_base 191: mod_base = OTHER; note = uracil
  modified_base 194..195: mod_base = OTHER; note = uracil
  modified_base 201: mod_base = OTHER; note = uracil
  modified_base 211..212: mod_base = OTHER; note = uracil
  modified_base 221..222: mod_base = OTHER; note = uracil
  modified_base 224: mod_base = OTHER; note = uracil
  modified_base 226: mod_base = OTHER; note = uracil
  modified_base 229..231: mod_base = OTHER; note = uracil
  modified_base 233: mod_base = OTHER; note = uracil
  modified_base 238: mod_base = OTHER; note = uracil
  modified_base 249: mod_base = OTHER; note = uracil
  modified_base 253: mod_base = OTHER; note = uracil
  modified_base 255: mod_base = OTHER; note = uracil
  modified_base 257: mod_base = OTHER; note = uracil
  modified_base 273: mod_base = OTHER; note = uracil
  modified_base 277..278: mod_base = OTHER; note = uracil
  modified_base 287: mod_base = OTHER; note = uracil
  modified_base 289: mod_base = OTHER; note = uracil
  modified_base 292: mod_base = OTHER; note = uracil
  modified_base 10: mod_base = m5c
  modified_base 20: mod_base = m5c
  modified_base 22: mod_base = m5c
  modified_base 27: mod_base = m5c
  modified_base 39: mod_base = m5c
  modified_base 46: mod_base = m5c
  modified_base 60: mod_base = m5c
  modified_base 67: mod_base = m5c
  modified_base 76: mod_base = m5c
  modified_base 158: mod_base = m5c
  modified_base 189: mod_base = m5c
  modified_base 207: mod_base = m5c
  modified_base 239: mod_base = m5c
  modified_base 266: mod_base = m5c
  modified_base 275: mod_base = m5c
  modified_base 282: mod_base = m5c
  modified_base 285: mod_base = m5c
  variation 150: note = CpG site, residue is C if methylated or T(=U) if unmethylated
ttaggagttcgtttgggagcgcgtagcgttttaggagtcgagagtcgttgtttggttttcgttggtcgggtaaatcgaggggaagtttttggtttttttttttttaagttttttattgtttttgtggggaaggtttttttaggtagaggygaaggatcggggagataattttttttatgggttatattcgttgttatggtttgtgtcgtgttagaaggtattttttagtttttagtgtcgtgaaaaatttgatatttaagaaggtcgattgatacgtttaacgtcgtatagtaatttagt

SEQ ID NO: 164 - DNA, 300 bp, synthetic construct
  source 1..300: mol_type = other DNA
  modified_base 2: mod_base = OTHER; note = uracil
  modified_base 10: mod_base = OTHER; note = uracil
  modified_base 30: mod_base = OTHER; note = uracil
  modified_base 37..38: mod_base = OTHER; note = uracil
  modified_base 41: mod_base = OTHER; note = uracil
  modified_base 50: mod_base = OTHER; note = uracil
  modified_base 59: mod_base = OTHER; note = uracil
  modified_base 64: mod_base = OTHER; note = uracil
  modified_base 66: mod_base = OTHER; note = uracil
  modified_base 73: mod_base = OTHER; note = uracil
  modified_base 83..84: mod_base = OTHER; note = uracil
  modified_base 87: mod_base = OTHER; note = uracil
  modified_base 91: mod_base = OTHER; note = uracil
  modified_base 96: mod_base = OTHER; note = uracil
  modified_base 98: mod_base = OTHER; note = uracil
  modified_base 102..103: mod_base = OTHER; note = uracil
  modified_base 108: mod_base = OTHER; note = uracil
  modified_base 120..122: mod_base = OTHER; note = uracil
  modified_base 137: mod_base = OTHER; note = uracil
  modified_base 139..141: mod_base = OTHER; note = uracil
  modified_base 146..147: mod_base = OTHER; note = uracil
  modified_base 152..153: mod_base = OTHER; note = uracil
  modified_base 155: mod_base = OTHER; note = uracil
  modified_base 158..159: mod_base = OTHER; note = uracil
  modified_base 168..169: mod_base = OTHER; note = uracil
  modified_base 172..175: mod_base = OTHER; note = uracil
  modified_base 177: mod_base = OTHER; note = uracil
  modified_base 183: mod_base = OTHER; note = uracil
  modified_base 193: mod_base = OTHER; note = uracil
  modified_base 209..210: mod_base = OTHER; note = uracil
  modified_base 216: mod_base = OTHER; note = uracil
  modified_base 219..222: mod_base = OTHER; note = uracil
  modified_base 231..232: mod_base = OTHER; note = uracil
  modified_base 236..237: mod_base = OTHER; note = uracil
  modified_base 246..247: mod_base = OTHER; note = uracil
  modified_base 251: mod_base = OTHER; note = uracil
  modified_base 257: mod_base = OTHER; note = uracil
  modified_base 259: mod_base = OTHER; note = uracil
  modified_base 264: mod_base = OTHER; note = uracil
  modified_base 266..267: mod_base = OTHER; note = uracil
  modified_base 275: mod_base = OTHER; note = uracil
  modified_base 282: mod_base = OTHER; note = uracil
  modified_base 284..286: mod_base = OTHER; note = uracil
  modified_base 294: mod_base = OTHER; note = uracil
  modified_base 296..297: mod_base = OTHER; note = uracil
  modified_base 15: mod_base = m5c
  modified_base 18: mod_base = m5c
  modified_base 25: mod_base = m5c
  modified_base 34: mod_base = m5c
  modified_base 61: mod_base = m5c
  modified_base 93: mod_base = m5c
  modified_base 111: mod_base = m5c
  modified_base 142: mod_base = m5c
  modified_base 224: mod_base = m5c
  modified_base 233: mod_base = m5c
  modified_base 240: mod_base = m5c
  modified_base 254: mod_base = m5c
  modified_base 261: mod_base = m5c
  modified_base 273: mod_base = m5c
  modified_base 278: mod_base = m5c
  modified_base 280: mod_base = m5c
  modified_base 290: mod_base = m5c
  variation 150: note = CpG site, residue is C if methylated or T(=U) if unmethylated
attaaattgttgtgcgacgttaggcgtgttaatcgatttttttgagtgttagattttttacggtattgagggttgagaggtattttttggtacgatatagattatggtagcggatgtggtttatgggagaggttattttttcggtttttygtttttatttaggagggttttttttatagaagtaataaggggtttaagggaaaggaggttaggagttttttttcggtttattcggttagcgagggttaagtagcggttttcggtttttagagcgttgcgcgtttttaggcgggtttttgg

SEQ ID NO: 165 - DNA, 300 bp, synthetic construct
  source 1..300: mol_type = other DNA
  modified_base 5: mod_base = OTHER; note = uracil
  modified_base 12: mod_base = OTHER; note = uracil
  modified_base 15: mod_base = OTHER; note = uracil
  modified_base 21: mod_base = OTHER; note = uracil
  modified_base 24: mod_base = OTHER; note = uracil
  modified_base 26: mod_base = OTHER; note = uracil
  modified_base 29: mod_base = OTHER; note = uracil
  modified_base 34..35: mod_base = OTHER; note = uracil
  modified_base 37: mod_base = OTHER; note = uracil
  modified_base 49: mod_base = OTHER; note = uracil
  modified_base 57: mod_base = OTHER; note = uracil
  modified_base 59: mod_base = OTHER; note = uracil
  modified_base 62..63: mod_base = OTHER; note = uracil
  modified_base 71: mod_base = OTHER; note = uracil
  modified_base 76: mod_base = OTHER; note = uracil
  modified_base 81: mod_base = OTHER; note = uracil
  modified_base 88: mod_base = OTHER; note = uracil
  modified_base 92..93: mod_base = OTHER; note = uracil
  modified_base 97: mod_base = OTHER; note = uracil
  modified_base 118: mod_base = OTHER; note = uracil
  modified_base 120: mod_base = OTHER; note = uracil
  modified_base 122: mod_base = OTHER; note = uracil
  modified_base 127: mod_base = OTHER; note = uracil
  modified_base 129: mod_base = OTHER; note = uracil
  modified_base 153: mod_base = OTHER; note = uracil
  modified_base 157: mod_base = OTHER; note = uracil
  modified_base 159: mod_base = OTHER; note = uracil
  modified_base 164: mod_base = OTHER; note = uracil
  modified_base 170: mod_base = OTHER; note = uracil
  modified_base 172: mod_base = OTHER; note = uracil
  modified_base 178: mod_base = OTHER; note = uracil
  modified_base 181: mod_base = OTHER; note = uracil
  modified_base 191: mod_base = OTHER; note = uracil
  modified_base 198: mod_base = OTHER; note = uracil
  modified_base 204: mod_base = OTHER; note = uracil
  modified_base 208: mod_base = OTHER; note = uracil
  modified_base 210..211: mod_base = OTHER; note = uracil
  modified_base 218: mod_base = OTHER; note = uracil
  modified_base 239: mod_base = OTHER; note = uracil
  modified_base 243: mod_base = OTHER; note = uracil
  modified_base 261: mod_base = OTHER; note = uracil
  modified_base 268: mod_base = OTHER; note = uracil
  modified_base 272: mod_base = OTHER; note = uracil
  modified_base 278: mod_base = OTHER; note = uracil
  modified_base 282: mod_base = OTHER; note = uracil
  modified_base 285: mod_base = OTHER; note = uracil
  modified_base 290: mod_base = OTHER; note = uracil
  modified_base 292..294: mod_base = OTHER; note = uracil
  modified_base 296: mod_base = OTHER; note = uracil
  modified_base 298: mod_base = OTHER; note = uracil
  modified_base 7: mod_base = m5c
  modified_base 16: mod_base = m5c
  modified_base 52: mod_base = m5c
  modified_base 60: mod_base = m5c
  modified_base 90: mod_base = m5c
  modified_base 102: mod_base = m5c
  modified_base 165: mod_base = m5c
  modified_base 250: mod_base = m5c
  modified_base 276: mod_base = m5c
  variation 150: note = CpG site, residue is C if methylated or T(=U) if unmethylated
gaggtacgaagttgtcggagttatttagttttatttttaggaaagatatagcgaattatcgttaataaaataaagtaaaataaaaagttcgttatgttgaacggaatgggaaaattgtttttttgttattaattttgattgaattgagtyggtaatttttgaatcggtttattgatataataataggaaatatttaattgttttttgtatttttaaatataaatagtaggtttttaagtagttagtaggcgatgtgtgattaaggtttagatagacgtagataattgattatttatttag

SEQ ID NO: 166 - DNA, 299 bp, synthetic construct
  source 1..299: mol_type = other DNA
  modified_base 1: mod_base = OTHER; note = uracil
  modified_base 14: mod_base = OTHER; note = uracil
  modified_base 21: mod_base = OTHER; note = uracil
  modified_base 27: mod_base = OTHER; note = uracil
  modified_base 31: mod_base = OTHER; note = uracil
  modified_base 36..37: mod_base = OTHER; note = uracil
  modified_base 43: mod_base = OTHER; note = uracil
  modified_base 45: mod_base = OTHER; note = uracil
  modified_base 47: mod_base = OTHER; note = uracil
  modified_base 52..53: mod_base = OTHER; note = uracil
  modified_base 56: mod_base = OTHER; note = uracil
  modified_base 60: mod_base = OTHER; note = uracil
  modified_base 63: mod_base = OTHER; note = uracil
  modified_base 71..72: mod_base = OTHER; note = uracil
  modified_base 75: mod_base = OTHER; note = uracil
  modified_base 94: mod_base = OTHER; note = uracil
  modified_base 101: mod_base = OTHER; note = uracil
  modified_base 114..115: mod_base = OTHER; note = uracil
  modified_base 127: mod_base = OTHER; note = uracil
  modified_base 134: mod_base = OTHER; note = uracil
  modified_base 140: mod_base = OTHER; note = uracil
  modified_base 149: mod_base = OTHER; note = uracil
  modified_base 153: mod_base = OTHER; note = uracil
  modified_base 155: mod_base = OTHER; note = uracil
  modified_base 160: mod_base = OTHER; note = uracil
  modified_base 164: mod_base = OTHER; note = uracil
  modified_base 176: mod_base = OTHER; note = uracil
  modified_base 184: mod_base = OTHER; note = uracil
  modified_base 191..193: mod_base = OTHER; note = uracil
  modified_base 197: mod_base = OTHER; note = uracil
  modified_base 202: mod_base = OTHER; note = uracil
  modified_base 205: mod_base = OTHER; note = uracil
  modified_base 214: mod_base = OTHER; note = uracil
  modified_base 226: mod_base = OTHER; note = uracil
  modified_base 250: mod_base = OTHER; note = uracil
  modified_base 256: mod_base = OTHER; note = uracil
  modified_base 260..261: mod_base = OTHER; note = uracil
  modified_base 273: mod_base = OTHER; note = uracil
  modified_base 281: mod_base = OTHER; note = uracil
  modified_base 283: mod_base = OTHER; note = uracil
  modified_base 287: mod_base = OTHER; note = uracil
  modified_base 290: mod_base = OTHER; note = uracil
  modified_base 297..298: mod_base = OTHER; note = uracil
  modified_base 24: mod_base = m5c
  modified_base 50: mod_base = m5c
  modified_base 135: mod_base = m5c
  modified_base 198: mod_base = m5c
  modified_base 210: mod_base = m5c
  modified_base 240: mod_base = m5c
  modified_base 248: mod_base = m5c
  modified_base 284: mod_base = m5c
  modified_base 293: mod_base = m5c
  variation 150: note = CpG site, residue is C if methylated or T(=U) if unmethylated
ttgagtgggtgattagttgtttgcgtttgtttgaattttgattatatatcgtttattgattgtttaaaaatttattatttatgtttaaaggtgtaagaaatagttaaatgttttttattgttgtattagtgaatcggtttagagattgtygatttaatttaattaaaattagtgataagagagtaatttttttatttcgtttagtatggcgagttttttgttttgttttgttttattggcggtgattcgttgtattttttttagaggtaaagttgagtagtttcggtagtttcgtgttt

SEQ ID NO: 167 - DNA, 300 bp, synthetic construct
  source 1..300: mol_type = other DNA
  modified_base 3..4: mod_base = OTHER; note = uracil
  modified_base 6: mod_base = OTHER; note = uracil
  modified_base 9: mod_base = OTHER; note = uracil
  modified_base 11: mod_base = OTHER; note = uracil
  modified_base 19: mod_base = OTHER; note = uracil
  modified_base 21: mod_base = OTHER; note = uracil
  modified_base 41..42: mod_base = OTHER; note = uracil
  modified_base 44: mod_base = OTHER; note = uracil
  modified_base 48: mod_base = OTHER; note = uracil
  modified_base 51: mod_base = OTHER; note = uracil
  modified_base 53..55: mod_base = OTHER; note = uracil
  modified_base 58..59: mod_base = OTHER; note = uracil
  modified_base 61..63: mod_base = OTHER; note = uracil
  modified_base 67: mod_base = OTHER; note = uracil
  modified_base 74..75: mod_base = OTHER; note = uracil
  modified_base 80: mod_base = OTHER; note = uracil
  modified_base 83: mod_base = OTHER; note = uracil
  modified_base 85: mod_base = OTHER; note = uracil
  modified_base 95: mod_base = OTHER; note = uracil
  modified_base 99..100: mod_base = OTHER; note = uracil
  modified_base 102: mod_base = OTHER; note = uracil
  modified_base 112: mod_base = OTHER; note = uracil
  modified_base 118..121: mod_base = OTHER; note = uracil
  modified_base 125: mod_base = OTHER; note = uracil
  modified_base 127..128: mod_base = OTHER; note = uracil
  modified_base 132..133: mod_base = OTHER; note = uracil
  modified_base 142: mod_base = OTHER; note = uracil
  modified_base 146: mod_base = OTHER; note = uracil
  modified_base 152: mod_base = OTHER; note = uracil
  modified_base 156..159: mod_base = OTHER; note = uracil
  modified_base 162: mod_base = OTHER; note = uracil
  modified_base 164..165: mod_base = OTHER; note = uracil
  modified_base 169: mod_base = OTHER; note = uracil
  modified_base 172..175: mod_base = OTHER; note = uracil
  modified_base 177: mod_base = OTHER; note = uracil
  modified_base 179: mod_base = OTHER; note = uracil
  modified_base 181: mod_base = OTHER; note = uracil
  modified_base 184: mod_base = OTHER; note = uracil
  modified_base 188: mod_base = OTHER; note = uracil
  modified_base 190..191: mod_base = OTHER; note = uracil
  modified_base 193..194: mod_base = OTHER; note = uracil
  modified_base 198..199: mod_base = OTHER; note = uracil
  modified_base 205: mod_base = OTHER; note = uracil
  modified_base 207..208: mod_base = OTHER; note = uracil
  modified_base 212..213: mod_base = OTHER; note = uracil
  modified_base 216: mod_base = OTHER; note = uracil
  modified_base 220..221: mod_base = OTHER; note = uracil
  modified_base 234: mod_base = OTHER; note = uracil
  modified_base 237: mod_base = OTHER; note = uracil
  modified_base 239..243: mod_base = OTHER; note = uracil
  modified_base 245..247: mod_base = OTHER; note = uracil
  modified_base 251: mod_base = OTHER; note = uracil
  modified_base 254..255: mod_base = OTHER; note = uracil
  modified_base 259: mod_base = OTHER; note = uracil
  modified_base 262: mod_base = OTHER; note = uracil
  modified_base 266..267: mod_base = OTHER; note = uracil
  modified_base 279: mod_base = OTHER; note = uracil
  modified_base 281..282: mod_base = OTHER; note = uracil
  modified_base 289..290: mod_base = OTHER; note = uracil
  modified_base 300: mod_base = OTHER; note = uracil
  modified_base 12: mod_base = m5c
  modified_base 22: mod_base = m5c
  modified_base 29: mod_base = m5c
  modified_base 32: mod_base = m5c
  modified_base 64: mod_base = m5c
  modified_base 86: mod_base = m5c
  modified_base 109: mod_base = m5c
  modified_base 129: mod_base = m5c
  modified_base 153: mod_base = m5c
  modified_base 185: mod_base = m5c
  modified_base 200: mod_base = m5c
  modified_base 252: mod_base = m5c
  modified_base 268: mod_base = m5c
  modified_base 277: mod_base = m5c
  modified_base 287: mod_base = m5c
  modified_base 296: mod_base = m5c
  variation 150: note = CpG site, residue is C if methylated or T(=U) if unmethylated
gattttagtttcgggtgatatcggtgggcgtcgggtgtggttttagatagtttttttttttttcggttggttgttaggttaatatcgggtgggattagtttttggtgtcggtagtagttttatgttttcggtttttgggtttttgtatgygtcgtttttattatttggttgttttttttattttcgtttttatttgtttcgggttatttgttttttaagttagaaattaaggatagtatttttttttagatcgtttggttgtagtttcgggatgggcgtttttagtcgtttagatcgggt

SEQ ID NO: 168 - DNA, 300 bp, synthetic construct
  source 1..300: mol_type = other DNA
  modified_base 2..3: mod_base = OTHER; note = uracil
  modified_base 8: mod_base = OTHER; note = uracil
  modified_base 16: mod_base = OTHER; note = uracil
  modified_base 25..27: mod_base = OTHER; note = uracil
  modified_base 30..31: mod_base = OTHER; note = uracil
  modified_base 37: mod_base = OTHER; note = uracil
  modified_base 40: mod_base = OTHER; note = uracil
  modified_base 43..44: mod_base = OTHER; note = uracil
  modified_base 52: mod_base = OTHER; note = uracil
  modified_base 65: mod_base = OTHER; note = uracil
  modified_base 69..70: mod_base = OTHER; note = uracil
  modified_base 78: mod_base = OTHER; note = uracil
  modified_base 82: mod_base = OTHER; note = uracil
  modified_base 91: mod_base = OTHER; note = uracil
  modified_base 98..99: mod_base = OTHER; note = uracil
  modified_base 105: mod_base = OTHER; note = uracil
  modified_base 130: mod_base = OTHER; note = uracil
  modified_base 133..134: mod_base = OTHER; note = uracil
  modified_base 152: mod_base = OTHER; note = uracil
  modified_base 156: mod_base = OTHER; note = uracil
  modified_base 162..164: mod_base = OTHER; note = uracil
  modified_base 170: mod_base = OTHER; note = uracil
  modified_base 177: mod_base = OTHER; note = uracil
  modified_base 184: mod_base = OTHER; note = uracil
  modified_base 187: mod_base = OTHER; note = uracil
  modified_base 190: mod_base = OTHER; note = uracil
  modified_base 194: mod_base = OTHER; note = uracil
  modified_base 196..197: mod_base = OTHER; note = uracil
  modified_base 203: mod_base = OTHER; note = uracil
  modified_base 208..210: mod_base = OTHER; note = uracil
  modified_base 212..213: mod_base = OTHER; note = uracil
  modified_base 223..224: mod_base = OTHER; note = uracil
  modified_base 228: mod_base = OTHER; note = uracil
  modified_base 231..232: mod_base = OTHER; note = uracil
  modified_base 235: mod_base = OTHER; note = uracil
  modified_base 251: mod_base = OTHER; note = uracil
  modified_base 255: mod_base = OTHER; note = uracil
  modified_base 261..262: mod_base = OTHER; note = uracil
  modified_base 264: mod_base = OTHER; note = uracil
  modified_base 266..267: mod_base = OTHER; note = uracil
  modified_base 273..275: mod_base = OTHER; note = uracil
  modified_base 277: mod_base = OTHER; note = uracil
  modified_base 284: mod_base = OTHER; note = uracil
  modified_base 286..287: mod_base = OTHER; note = uracil
  modified_base 293: mod_base = OTHER; note = uracil
  modified_base 300: mod_base = OTHER; note = uracil
  modified_base 4: mod_base = m5c
  modified_base 13: mod_base = m5c
  modified_base 23: mod_base = m5c
  modified_base 32: mod_base = m5c
  modified_base 48: mod_base = m5c
  modified_base 100: mod_base = m5c
  modified_base 115: mod_base = m5c
  modified_base 147: mod_base = m5c
  modified_base 171: mod_base = m5c
  modified_base 191: mod_base = m5c
  modified_base 214: mod_base = m5c
  modified_base 236: mod_base = m5c
  modified_base 268: mod_base = m5c
  modified_base 271: mod_base = m5c
  modified_base 278: mod_base = m5c
  modified_base 288: mod_base = m5c
  variation 150: note = CpG site, residue is C if methylated or T(=U) if unmethylated
gttcgatttaggcgattaggagcgtttatttcgggattgtagttaggcggtttgggagggggtgttgtttttaatttttggtttgaaggataggtgattcgggataggtggagacggaagtgagaggggtagttaggtgatggggacggygtatgtaagaatttaaaggtcgggagtatggggttattgtcgatattagaggttagttttattcggtgttgatttggtaattagtcggggaggaagggagttgtttgaggttatattcgacgtttatcggtgttattcggagttgaggtt

SEQ ID NO: 169 - DNA, 300 bp, synthetic construct
  source 1..300: mol_type = other DNA
  modified_base 5: mod_base = OTHER; note = uracil
  modified_base 11: mod_base = OTHER; note = uracil
  modified_base 14..15: mod_base = OTHER; note = uracil
  modified_base 23: mod_base = OTHER; note = uracil
  modified_base 25: mod_base = OTHER; note = uracil
  modified_base 28..29: mod_base = OTHER; note = uracil
  modified_base 33..34: mod_base = OTHER; note = uracil
  modified_base 36: mod_base = OTHER; note = uracil
  modified_base 39..40: mod_base = OTHER; note = uracil
  modified_base 45..46: mod_base = OTHER; note = uracil
  modified_base 52..53: mod_base = OTHER; note = uracil
  modified_base 56: mod_base = OTHER; note = uracil
  modified_base 59: mod_base = OTHER; note = uracil
  modified_base 64..68: mod_base = OTHER; note = uracil
  modified_base 71: mod_base = OTHER; note = uracil
  modified_base 74: mod_base = OTHER; note = uracil
  modified_base 85: mod_base = OTHER; note = uracil
  modified_base 87: mod_base = OTHER; note = uracil
  modified_base 90: mod_base = OTHER; note = uracil
  modified_base 97: mod_base = OTHER; note = uracil
  modified_base 100..102: mod_base = OTHER; note = uracil
  modified_base 107: mod_base = OTHER; note = uracil
  modified_base 109: mod_base = OTHER; note = uracil
  modified_base 112: mod_base = OTHER; note = uracil
  modified_base 119: mod_base = OTHER; note = uracil
  modified_base 121: mod_base = OTHER; note = uracil
  modified_base 139: mod_base = OTHER; note = uracil
  modified_base 146: mod_base = OTHER; note = uracil
  modified_base 153: mod_base = OTHER; note = uracil
  modified_base 164: mod_base = OTHER; note = uracil
  modified_base 168: mod_base = OTHER; note = uracil
  modified_base 178: mod_base = OTHER; note = uracil
  modified_base 192..193: mod_base = OTHER; note = uracil
  modified_base 196: mod_base = OTHER; note = uracil
  modified_base 201: mod_base = OTHER; note = uracil
  modified_base 206: mod_base = OTHER; note = uracil
  modified_base 220: mod_base = OTHER; note = uracil
  modified_base 223: mod_base = OTHER; note = uracil
  modified_base 226: mod_base = OTHER; note = uracil
  modified_base 228..230: mod_base = OTHER; note = uracil
  modified_base 238: mod_base = OTHER; note = uracil
  modified_base 240: mod_base = OTHER; note = uracil
  modified_base 248: mod_base = OTHER; note = uracil
  modified_base 251..252: mod_base = OTHER; note = uracil
  modified_base 257..258: mod_base = OTHER; note = uracil
  modified_base 267..268: mod_base = OTHER; note = uracil
  modified_base 292..294: mod_base = OTHER; note = uracil
  modified_base 297: mod_base = OTHER; note = uracil
  modified_base 18: mod_base = m5c
  modified_base 76: mod_base = m5c
  modified_base 113: mod_base = m5c
  modified_base 126: mod_base = m5c
  modified_base 169: mod_base = m5c
  modified_base 173: mod_base = m5c
  variation 151: note = CpG site, residue is C if methylated or T(=U) if unmethylated
gtatttgtgttaattagcggtttttagtttggttttatttagggtttgaagtttattatagaatttttagtagtacgtggggtgtatagtaaagattagttttggatatagtcgggtgtttagggcggggtgagggggtaggaggtaggaygtaggaggtgagttgttcgggcggggtaggatgagggagttttgtattgtagagttaagggggagaattattagtattttaattagtttttgatggtttttaaagttttttaagttttttttttttttttttttttttatttttataag

SEQ ID NO: 170 - DNA, 300 bp, synthetic construct
  source 1..300: mol_type = other DNA
  modified_base 1: mod_base = OTHER; note = uracil
  modified_base 36: mod_base = OTHER; note = uracil
  modified_base 45: mod_base = OTHER; note = uracil
  modified_base 54..55: mod_base = OTHER; note = uracil
  modified_base 58: mod_base = OTHER; note = uracil
  modified_base 64: mod_base = OTHER; note = uracil
  modified_base 76: mod_base = OTHER; note = uracil
  modified_base 85: mod_base = OTHER; note = uracil
  modified_base 87..91: mod_base = OTHER; note = uracil
  modified_base 96: mod_base = OTHER; note = uracil
  modified_base 98: mod_base = OTHER; note = uracil
  modified_base 101: mod_base = OTHER; note = uracil
  modified_base 106: mod_base = OTHER; note = uracil
  modified_base 111: mod_base = OTHER; note = uracil
  modified_base 113..115: mod_base = OTHER; note = uracil
  modified_base 117: mod_base = OTHER; note = uracil
  modified_base 120..121: mod_base = OTHER; note = uracil
  modified_base 124..126: mod_base = OTHER; note = uracil
  modified_base 129..130: mod_base = OTHER; note = uracil
  modified_base 135: mod_base = OTHER; note = uracil
  modified_base 138: mod_base = OTHER; note = uracil
  modified_base 140: mod_base = OTHER; note = uracil
  modified_base 142..143: mod_base = OTHER; note = uracil
  modified_base 145..146: mod_base = OTHER; note = uracil
  modified_base 152..153: mod_base = OTHER; note = uracil
  modified_base 156..157: mod_base = OTHER; note = uracil
  modified_base 159..160: mod_base = OTHER; note = uracil
  modified_base 163..167: mod_base = OTHER; note = uracil
  modified_base 169: mod_base = OTHER; note = uracil
  modified_base 171..173: mod_base = OTHER; note = uracil
  modified_base 176..178: mod_base = OTHER; note = uracil
  modified_base 183: mod_base = OTHER; note = uracil
  modified_base 185..186: mod_base = OTHER; note = uracil
  modified_base 190: mod_base = OTHER; note = uracil
  modified_base 196..197: mod_base = OTHER; note = uracil
  modified_base 202: mod_base = OTHER; note = uracil
  modified_base 207: mod_base = OTHER; note = uracil
  modified_base 212: mod_base = OTHER; note = uracil
  modified_base 217: mod_base = OTHER; note = uracil
  modified_base 219..222: mod_base = OTHER; note = uracil
  modified_base 228: mod_base = OTHER; note = uracil
  modified_base 231: mod_base = OTHER; note = uracil
  modified_base 240: mod_base = OTHER; note = uracil
  modified_base 250: mod_base = OTHER; note = uracil
  modified_base 253: mod_base = OTHER; note = uracil
  modified_base 257..259: mod_base = OTHER; note = uracil
  modified_base 269..270: mod_base = OTHER; note = uracil
  modified_base 274: mod_base = OTHER; note = uracil
  modified_base 281: mod_base = OTHER; note = uracil
  modified_base 284: mod_base = OTHER; note = uracil
  modified_base 292: mod_base = OTHER; note = uracil
  modified_base 294: mod_base = OTHER; note = uracil
  modified_base 300: mod_base = OTHER; note = uracil
  modified_base 127: mod_base = m5c
  modified_base 131: mod_base = m5c
  modified_base 174: mod_base = m5c
  modified_base 187: mod_base = m5c
  modified_base 224: mod_base = m5c
  modified_base 282: mod_base = m5c
  variation 149: note = CpG site, residue is C if methylated or T(=U) if unmethylated
tttgtagggataaaaaaaaaaaaaaaaaaaaaggatttaaaaggttttggaagttattaagagttaattagggtgttgatgatttttttttttagttttgtaatgtaggatttttttattttgtttcgttcggatagtttattttttgygttttgttttttgtttttttatttcgttttgagtattcggttgtgtttagggttgatttttgttgtgtattttacgtgttgttgggggttttgtagtaggttttaggttttggatgaggttaggttgagaatcgttggttgatatagatat

SEQ ID NO: 171 - DNA, 300 bp, synthetic construct
  source 1..300: mol_type = other DNA
  modified_base 7: mod_base = OTHER; note = uracil
  modified_base 11..12: mod_base = OTHER; note = uracil
  modified_base 14..15: mod_base = OTHER; note = uracil
  modified_base 19: mod_base = OTHER; note = uracil
  modified_base 24: mod_base = OTHER; note = uracil
  modified_base 28..30: mod_base = OTHER; note = uracil
  modified_base 36: mod_base = OTHER; note = uracil
  modified_base 43: mod_base = OTHER; note = uracil
  modified_base 49: mod_base = OTHER; note = uracil
  modified_base 59..61: mod_base = OTHER; note = uracil
  modified_base 72..73: mod_base = OTHER; note = uracil
  modified_base 76: mod_base = OTHER; note = uracil
  modified_base 84: mod_base = OTHER; note = uracil
  modified_base 96: mod_base = OTHER; note = uracil
  modified_base 98: mod_base = OTHER; note = uracil
  modified_base 102..103: mod_base = OTHER; note = uracil
  modified_base 106: mod_base = OTHER; note = uracil
  modified_base 110: mod_base = OTHER; note = uracil
  modified_base 113: mod_base = OTHER; note = uracil
  modified_base 115: mod_base = OTHER; note = uracil
  modified_base 123..125: mod_base = OTHER; note = uracil
  modified_base 130: mod_base = OTHER; note = uracil
  modified_base 140: mod_base = OTHER; note = uracil
  modified_base 142: mod_base = OTHER; note = uracil
  modified_base 146: mod_base = OTHER; note = uracil
  modified_base 150: mod_base = OTHER; note = uracil
  modified_base 157: mod_base = OTHER; note = uracil
  modified_base 162..164: mod_base = OTHER; note = uracil
  modified_base 167: mod_base = OTHER; note = uracil
  modified_base 172: mod_base = OTHER; note = uracil
  modified_base 176..179: mod_base = OTHER; note = uracil
  modified_base 181..182: mod_base = OTHER; note = uracil
  modified_base 186: mod_base = OTHER; note = uracil
  modified_base 193..194: mod_base = OTHER; note = uracil
  modified_base 197..198: mod_base = OTHER; note = uracil
  modified_base 202: mod_base = OTHER; note = uracil
  modified_base 205: mod_base = OTHER; note = uracil
  modified_base 207: mod_base = OTHER; note = uracil
  modified_base 211..212: mod_base = OTHER; note = uracil
  modified_base 214..215: mod_base = OTHER; note = uracil
  modified_base 218: mod_base = OTHER; note = uracil
  modified_base 220: mod_base = OTHER; note = uracil
  modified_base 227: mod_base = OTHER; note = uracil
  modified_base 237: mod_base = OTHER; note = uracil
  modified_base 245: mod_base = OTHER; note = uracil
  modified_base 260..261: mod_base = OTHER; note = uracil
  modified_base 267..268: mod_base = OTHER; note = uracil
  modified_base 271: mod_base = OTHER; note = uracil
  modified_base 277: mod_base = OTHER; note = uracil
  modified_base 288: mod_base = OTHER; note = uracil
  modified_base 290: mod_base = OTHER; note = uracil
  modified_base 295: mod_base = OTHER; note = uracil
  modified_base 74: mod_base = m5c
  modified_base 107: mod_base = m5c
  modified_base 188: mod_base = m5c
  modified_base 208: mod_base = m5c
  modified_base 229: mod_base = m5c
  modified_base 299: mod_base = m5c
  variation 116: note = CpG site, residue is C if methylated or T(=U) if unmethylated
  variation 184: note = CpG site, residue is C if methylated or T(=U) if unmethylated
gattaatttgttttttgataagttatattttttagtttagtattaaggtagaagagagttttgttgaagagttcgtttgtgttttgtggtaaagatataggtttatcggttttttygtgggttttagtgttgagaagggtataggttggttggagatagtgttttgtttgatagatttttttaygttcggatttttttagtttgtatcggttatttgtattggttttacggaagagttagaattttgttttaatgttggttagtttttattattagtttgaaaagaatatagaatttacg

SEQ ID NO: 172 - DNA, 300 bp, synthetic construct
  source 1..300: mol_type = other DNA
  modified_base 9: mod_base = OTHER; note = uracil
  modified_base 16: mod_base = OTHER; note = uracil
  modified_base 21: mod_base = OTHER; note = uracil
  modified_base 25: mod_base = OTHER; note = uracil
  modified_base 38: mod_base = OTHER; note = uracil
  modified_base 42..43: mod_base = OTHER; note = uracil
  modified_base 46: mod_base = OTHER; note = uracil
  modified_base 54: mod_base = OTHER; note = uracil
  modified_base 61: mod_base = OTHER; note = uracil
  modified_base 65: mod_base = OTHER; note = uracil
  modified_base 67: mod_base = OTHER; note = uracil
  modified_base 70: mod_base = OTHER; note = uracil
  modified_base 78..79: mod_base = OTHER; note = uracil
  modified_base 84: mod_base = OTHER; note = uracil
  modified_base 91: mod_base = OTHER; note = uracil
  modified_base 97: mod_base = OTHER; note = uracil
  modified_base 101: mod_base = OTHER; note = uracil
  modified_base 111: mod_base = OTHER; note = uracil
  modified_base 127: mod_base = OTHER; note = uracil
  modified_base 131: mod_base = OTHER; note = uracil
  modified_base 135: mod_base = OTHER; note = uracil
  modified_base 140: mod_base = OTHER; note = uracil
  modified_base 142: mod_base = OTHER; note = uracil
  modified_base 146: mod_base = OTHER; note = uracil
  modified_base 148..149: mod_base = OTHER; note = uracil
  modified_base 152..153: mod_base = OTHER; note = uracil
  modified_base 156..157: mod_base = OTHER; note = uracil
  modified_base 162..164: mod_base = OTHER; note = uracil
  modified_base 167: mod_base = OTHER; note = uracil
  modified_base 169: mod_base = OTHER; note = uracil
  modified_base 172: mod_base = OTHER; note = uracil
  modified_base 174: mod_base = OTHER; note = uracil
  modified_base 180..182: mod_base = OTHER; note = uracil
  modified_base 192: mod_base = OTHER; note = uracil
  modified_base 200..201: mod_base = OTHER; note = uracil
  modified_base 207: mod_base = OTHER; note = uracil
  modified_base 212..213: mod_base = OTHER; note = uracil
  modified_base 215: mod_base = OTHER; note = uracil
  modified_base 220: mod_base = OTHER; note = uracil
  modified_base 222: mod_base = OTHER; note = uracil
  modified_base 230: mod_base = OTHER; note = uracil
  modified_base 232: mod_base = OTHER; note = uracil
  modified_base 235: mod_base = OTHER; note = uracil
  modified_base 238: mod_base = OTHER; note = uracil
  modified_base 243: mod_base = OTHER; note = uracil
  modified_base 245: mod_base = OTHER; note = uracil
  modified_base 247: mod_base = OTHER; note = uracil
  modified_base 250: mod_base = OTHER; note = uracil
  modified_base 253..254: mod_base = OTHER; note = uracil
  modified_base 261: mod_base = OTHER; note = uracil
  modified_base 266: mod_base = OTHER; note = uracil
  modified_base 279: mod_base = OTHER; note = uracil
  modified_base 284: mod_base = OTHER; note = uracil
  modified_base 291: mod_base = OTHER; note = uracil
  modified_base 300: mod_base = OTHER; note = uracil
  modified_base 1: mod_base = m5c
  modified_base 71: mod_base = m5c
  modified_base 92: mod_base = m5c
  modified_base 112: mod_base = m5c
  modified_base 193: mod_base = m5c
  modified_base 226: mod_base = m5c
  variation 116: note = CpG site, residue is C if methylated or T(=U) if unmethylated
  variation 184: note = CpG site, residue is C if methylated or T(=U) if unmethylated
cgtaagttttgtgttttttttaagttaatgatggaaattggttaatattaaaatagaattttagttttttcgtgaaattagtgtaggtggtcggtgtagattggaaggattcgagygtggaggggtttgttaagtagggtattgtttttagttagtttgtgttttttttagtattgggatttayggagaagtcggtaggtttgtgtttttattatagaatataagcgggttttttaatagggtttttttttgttttagtattaagttaaagggtatgatttgttaggaggtaagttaatt

SEQ ID NO: 173 - DNA, 300 bp, synthetic construct
  source 1..300: mol_type = other DNA
  modified_base 3..4: mod_base = OTHER; note = uracil
  modified_base 6: mod_base = OTHER; note = uracil
  modified_base 16: mod_base = OTHER; note = uracil
  modified_base 20: mod_base = OTHER; note = uracil
  modified_base 24..25: mod_base = OTHER; note = uracil
  modified_base 50: mod_base = OTHER; note = uracil
  modified_base 52: mod_base = OTHER; note = uracil
  modified_base 54: mod_base = OTHER; note = uracil
  modified_base 62..64: mod_base = OTHER; note = uracil
  modified_base 68: mod_base = OTHER; note = uracil
  modified_base 73: mod_base = OTHER; note = uracil
  modified_base 75: mod_base = OTHER; note = uracil
  modified_base 79: mod_base = OTHER; note = uracil
  modified_base 81..82: mod_base = OTHER; note = uracil
  modified_base 87: mod_base = OTHER; note = uracil
  modified_base 89: mod_base = OTHER; note = uracil
  modified_base 97..98: mod_base = OTHER; note = uracil
  modified_base 100..101: mod_base = OTHER; note = uracil
  modified_base 104..105: mod_base = OTHER; note = uracil
  modified_base 107: mod_base = OTHER; note = uracil
  modified_base 110..111: mod_base = OTHER; note = uracil
  modified_base 113..115: mod_base = OTHER; note = uracil
  modified_base 134: mod_base = OTHER; note = uracil
  modified_base 140..141: mod_base = OTHER; note = uracil
  modified_base 143..144: mod_base = OTHER; note = uracil
  modified_base 148: mod_base = OTHER; note = uracil
  modified_base 156..157: mod_base = OTHER; note = uracil
  modified_base 159..160: mod_base = OTHER; note = uracil
  modified_base 164..165: mod_base = OTHER; note = uracil
  modified_base 167: mod_base = OTHER; note = uracil
  modified_base 172..175: mod_base = OTHER; note = uracil
  modified_base 187: mod_base = OTHER; note = uracil
  modified_base 190: mod_base = OTHER; note = uracil
  modified_base 193: mod_base = OTHER; note = uracil
  modified_base 198..199: mod_base = OTHER; note = uracil
  modified_base 203: mod_base = OTHER; note = uracil
  modified_base 205: mod_base = OTHER; note = uracil
  modified_base 208: mod_base = OTHER; note = uracil
  modified_base 214: mod_base = OTHER; note = uracil
  modified_base 226: mod_base = OTHER; note = uracil
  modified_base 230: mod_base = OTHER; note = uracil
  modified_base 241..242: mod_base = OTHER; note = uracil
  modified_base 250: mod_base = OTHER; note = uracil
  modified_base 262: mod_base = OTHER; note = uracil
  modified_base 271: mod_base = OTHER; note = uracil
  modified_base 273..274: mod_base = OTHER; note = uracil
  modified_base 284: mod_base = OTHER; note = uracil
  modified_base 290: mod_base = OTHER; note = uracil
  modified_base 295..296: mod_base = OTHER; note = uracil
  modified_base 26: mod_base = m5c
  modified_base 177: mod_base = m5c
  modified_base 201: mod_base = m5c
  modified_base 209: mod_base = m5c
  modified_base 232: mod_base = m5c
  variation 150: note = CpG site, residue is C if methylated or T(=U) if unmethylated
gattataggtgtgtgttattatgttcgggtaatttttatattttttggttttattatgttgtttaggttggttttaaatttttgggtttaagtgatttttttgttttagttttttaaagtgttggattagaggtatgagttattttgtaygtttgttttttgattttaggtttttacggagttggttattttttgggtttcgtttagtcggtgttgaaggtgagttatgttcgatgatgatttgaggagtagaagaaggtgtaggtgagttatttgaggggaattgggttatgattagag

SEQ ID NO: 174 - DNA, 300 bp, synthetic construct
  source 1..300: mol_type = other DNA
  modified_base 1: mod_base = OTHER; note = uracil
  modified_base 3: mod_base = OTHER; note = uracil
  modified_base 8: mod_base = OTHER; note = uracil
  modified_base 13..15: mod_base = OTHER; note = uracil
  modified_base 20..23: mod_base = OTHER; note = uracil
  modified_base 25: mod_base = OTHER; note = uracil
  modified_base 32: mod_base = OTHER; note = uracil
  modified_base 34: mod_base = OTHER; note = uracil
  modified_base 36..37: mod_base = OTHER; note = uracil
  modified_base 40: mod_base = OTHER; note = uracil
  modified_base 42..43: mod_base = OTHER; note = uracil
  modified_base 46: mod_base = OTHER; note = uracil
  modified_base 49: mod_base = OTHER; note = uracil
  modified_base 52: mod_base = OTHER; note = uracil
  modified_base 54..55: mod_base = OTHER; note = uracil
  modified_base 57: mod_base = OTHER; note = uracil
  modified_base 62: mod_base = OTHER; note = uracil
  modified_base 65: mod_base = OTHER; note = uracil
  modified_base 72: mod_base = OTHER; note = uracil
  modified_base 77: mod_base = OTHER; note = uracil
  modified_base 79: mod_base = OTHER; note = uracil
  modified_base 81..82: mod_base = OTHER; note = uracil
  modified_base 85: mod_base = OTHER; note = uracil
  modified_base 88: mod_base = OTHER; note = uracil
  modified_base 90: mod_base = OTHER; note = uracil
  modified_base 94: mod_base = OTHER; note = uracil
  modified_base 104..106: mod_base = OTHER; note = uracil
  modified_base 116..117: mod_base = OTHER; note = uracil
  modified_base 120: mod_base = OTHER; note = uracil
  modified_base 122: mod_base = OTHER; note = uracil
  modified_base 131..132: mod_base = OTHER; note = uracil
  modified_base 139: mod_base = OTHER; note = uracil
  modified_base 146: mod_base = OTHER; note = uracil
  modified_base 154: mod_base = OTHER; note = uracil
  modified_base 162: mod_base = OTHER; note = uracil
  modified_base 164: mod_base = OTHER; note = uracil
  modified_base 168..169: mod_base = OTHER; note = uracil
  modified_base 171: mod_base = OTHER; note = uracil
  modified_base 176..177: mod_base = OTHER; note = uracil
  modified_base 180: mod_base = OTHER; note = uracil
  modified_base 182: mod_base = OTHER; note = uracil
  modified_base 192: mod_base = OTHER; note = uracil
  modified_base 198: mod_base = OTHER; note = uracil
  modified_base 207: mod_base = OTHER; note = uracil
  modified_base 209: mod_base = OTHER; note = uracil
  modified_base 215..217: mod_base = OTHER; note = uracil
  modified_base 230..231: mod_base = OTHER; note = uracil
  modified_base 234..235: mod_base = OTHER; note = uracil
  modified_base 240: mod_base = OTHER; note = uracil
  modified_base 243: mod_base = OTHER; note = uracil
  modified_base 253..254: mod_base = OTHER; note = uracil
  modified_base 272..273: mod_base = OTHER; note = uracil
  modified_base 278: mod_base = OTHER; note = uracil
  modified_base 286: mod_base = OTHER; note = uracil
  modified_base 288: mod_base = OTHER; note = uracil
  modified_base 290: mod_base = OTHER; note = uracil
  modified_base 292..293: mod_base = OTHER; note = uracil
  modified_base 300: mod_base = OTHER; note = uracil
  modified_base 68: mod_base = m5c
  modified_base 91: mod_base = m5c
  modified_base 99: mod_base = m5c
  modified_base 123: mod_base = m5c
  modified_base 274: mod_base = m5c
  variation 150: note = CpG site, residue is C if methylated or T(=U) if unmethylated
ttttggttatgatttagttttttttaggtgatttatttgtatttttttttgttttttaggttattatcgagtatgatttatttttagtatcggttgagcgaggtttagaagatgattaatttcgtggggatttgaggttaggaggtaaaygtgtaaggtggtttatgtttttaatttaatattttgggaggttgaggtaggaggattatttgagtttaggagtttgagattagtttgggtaatatagtgagattaaaaaatataaaaattattcgggtatgatagtatatatttgtggtt

SEQ ID NO: 175 - DNA, 300 bp, synthetic construct
  source 1..300: mol_type = other DNA
  modified_base 13: mod_base = OTHER; note = uracil
  modified_base 29: mod_base = OTHER; note = uracil
  modified_base 34: mod_base = OTHER; note = uracil
  modified_base 43..44: mod_base = OTHER; note = uracil
  modified_base 46..48: mod_base = OTHER; note = uracil
  modified_base 59..60: mod_base = OTHER; note = uracil
  modified_base 66: mod_base = OTHER; note = uracil
  modified_base 75: mod_base = OTHER; note = uracil
  modified_base 83: mod_base = OTHER; note = uracil
  modified_base 87: mod_base = OTHER; note = uracil
  modified_base 96..97: mod_base = OTHER; note = uracil
  modified_base 102: mod_base = OTHER; note = uracil
  modified_base 107: mod_base = OTHER; note = uracil
  modified_base 114: mod_base = OTHER; note = uracil
  modified_base 124: mod_base = OTHER; note = uracil
  modified_base 128..129: mod_base = OTHER; note = uracil
  modified_base 136: mod_base = OTHER; note = uracil
  modified_base 142..143: mod_base = OTHER; note = uracil
  modified_base 145: mod_base = OTHER; note = uracil
  modified_base 148..149: mod_base = OTHER; note = uracil
  modified_base 177..178: mod_base = OTHER; note = uracil
  modified_base 188..189: mod_base = OTHER; note = uracil
  modified_base 198: mod_base = OTHER; note = uracil
  modified_base 202: mod_base = OTHER; note = uracil
  modified_base 205: mod_base = OTHER; note = uracil
  modified_base 219: mod_base = OTHER; note = uracil
  modified_base 221: mod_base = OTHER; note = uracil
  modified_base 228: mod_base = OTHER; note = uracil
  modified_base 230: mod_base = OTHER; note = uracil
  modified_base 237: mod_base = OTHER; note = uracil
  modified_base 239: mod_base = OTHER; note = uracil
  modified_base 248: mod_base = OTHER; note = uracil
  modified_base 250..252: mod_base = OTHER; note = uracil
  modified_base 256: mod_base = OTHER; note = uracil
  modified_base 258: mod_base = OTHER; note = uracil
  modified_base 262..263: mod_base = OTHER; note = uracil
  modified_base 266..269: mod_base = OTHER; note = uracil
  modified_base 273: mod_base = OTHER; note = uracil
  modified_base 275..277: mod_base = OTHER; note = uracil
  modified_base 279..280: mod_base = OTHER; note = uracil
  modified_base 282..283: mod_base = OTHER; note = uracil
  modified_base 289: mod_base = OTHER; note = uracil
  modified_base 294: mod_base = OTHER; note = uracil
  modified_base 296..298: mod_base = OTHER; note = uracil
  modified_base 8: mod_base = m5c
  modified_base 41: mod_base = m5c
  modified_base 50: mod_base = m5c
  modified_base 103: mod_base = m5c
  modified_base 119: mod_base = m5c
  modified_base 172: mod_base = m5c
  modified_base 231: mod_base = m5c
  modified_base 240: mod_base = m5c
  modified_base 271: mod_base = m5c
  variation 150: note = CpG site, residue is C if methylated or T(=U) if unmethylated
aggaagtcgaggtttagaagttgggtgatttgttaaaggtcgttatttacggtgagggttaggttttgggagggttgaggggtaggtatggtgagttagtttcgggtatgaggtaaggcgtggtaggtttgggggtaaaagttatagttygtgtggagggggtggggggatcgaggtttttgggaagtttgtggattttggttgtagtgtgggtgtgatattgagtgtttcggggatttcgagttattatttaggtattggttagttttacgtttttttttttaggtatttggttttttg

SEQ ID NO: 176 - DNA, 300 bp, synthetic construct
  source 1..300: mol_type = other DNA
  modified_base 7..8: mod_base = OTHER; note = uracil
  modified_base 14..15: mod_base = OTHER; note = uracil
  modified_base 35: mod_base = OTHER; note = uracil
  modified_base 39..40: mod_base = OTHER; note = uracil
  modified_base 45..46: mod_base = OTHER; note = uracil
  modified_base 57: mod_base = OTHER; note = uracil
  modified_base 65..67: mod_base = OTHER; note = uracil
  modified_base 73: mod_base = OTHER; note = uracil
  modified_base 75: mod_base = OTHER; note = uracil
  modified_base 77: mod_base = OTHER; note = uracil
  modified_base 83: mod_base = OTHER; note = uracil
  modified_base 85: mod_base = OTHER; note = uracil
  modified_base 87..89: mod_base = OTHER; note = uracil
  modified_base 91: mod_base = OTHER; note = uracil
  modified_base 93: mod_base = OTHER; note = uracil
  modified_base 96: mod_base = OTHER; note = uracil
  modified_base 99..100: mod_base = OTHER; note = uracil
  modified_base 106..107: mod_base = OTHER; note = uracil
  modified_base 109: mod_base = OTHER; note = uracil
  modified_base 113: mod_base = OTHER; note = uracil
  modified_base 116..118: mod_base = OTHER; note = uracil
  modified_base 124..125: mod_base = OTHER; note = uracil
  modified_base 131..136: mod_base = OTHER; note = uracil
  modified_base 138..142: mod_base = OTHER; note = uracil
  modified_base 144..145: mod_base = OTHER; note = uracil
  modified_base 147: mod_base = OTHER; note = uracil
  modified_base 153: mod_base = OTHER; note = uracil
  modified_base 159: mod_base = OTHER; note = uracil
  modified_base 165..169: mod_base = OTHER; note = uracil
  modified_base 173..174: mod_base = OTHER; note = uracil
  modified_base 177..178: mod_base = OTHER; note = uracil
  modified_base 182..183: mod_base = OTHER; note = uracil
  modified_base 187..188: mod_base = OTHER; note = uracil
  modified_base 190: mod_base = OTHER; note = uracil
  modified_base 194..195: mod_base = OTHER; note = uracil
  modified_base 201: mod_base = OTHER; note = uracil
  modified_base 205: mod_base = OTHER; note = uracil
  modified_base 207: mod_base = OTHER; note = uracil
  modified_base 209..210: mod_base = OTHER; note = uracil
  modified_base 214..215: mod_base = OTHER; note = uracil
  modified_base 218..221: mod_base = OTHER; note = uracil
  modified_base 223: mod_base = OTHER; note = uracil
  modified_base 226..228: mod_base = OTHER; note = uracil
  modified_base 230..232: mod_base = OTHER; note = uracil
  modified_base 237..238: mod_base = OTHER; note = uracil
  modified_base 242..244: mod_base = OTHER; note = uracil
  modified_base 246: mod_base = OTHER; note = uracil
  modified_base 248: mod_base = OTHER; note = uracil
  modified_base 261..262: mod_base = OTHER; note = uracil
  modified_base 268: mod_base = OTHER; note = uracil
  modified_base 273: mod_base = OTHER; note = uracil
  modified_base 275..277: mod_base = OTHER; note = uracil
  modified_base 280: mod_base = OTHER; note = uracil
  modified_base 283: mod_base = OTHER; note = uracil
  modified_base 288..289: mod_base = OTHER; note = uracil
  modified_base 294: mod_base = OTHER; note = uracil
  modified_base 297..298: mod_base = OTHER; note = uracil
  modified_base 300: mod_base = OTHER; note = uracil
  modified_base 28: mod_base = m5c
  modified_base 59: mod_base = m5c
  modified_base 68: mod_base = m5c
  modified_base 127: mod_base = m5c
  modified_base 180: mod_base = m5c
  modified_base 196: mod_base = m5c
  modified_base 249: mod_base = m5c
  modified_base 258: mod_base = m5c
  modified_base 291: mod_base = m5c
  variation 149: note = CpG site, residue is C if methylated or T(=U) if unmethylated
agggagttaagtatttggaggagggagcgtggggttggttagtgtttgggtgataattcggagttttcggagtatttagtgttatatttatattgtagttagaatttataggttttttaaaggtttcgatttttttattttttttataygggttgtggtttttgtttttaggtttgttacgttttgttttatgttcggaattggtttattatgtttgttttttagtttttttagaatttggtttttatcgtgggtggcgatttttgataagttatttaatttttaagtttcgattttttt

SEQ ID NO: 177 - DNA, 300 bp, synthetic construct
  source 1..300: mol_type = other DNA
  modified_base 3..4: mod_base = OTHER; note = uracil
  modified_base 12..13: mod_base = OTHER; note = uracil
  modified_base 15..16: mod_base = OTHER; note = uracil
  modified_base 21..22: mod_base = OTHER; note = uracil
  modified_base 25..26: mod_base = OTHER; note = uracil
  modified_base 28..32: mod_base = OTHER; note = uracil
  modified_base 34..35: mod_base = OTHER; note = uracil
  modified_base 37..38: mod_base = OTHER; note = uracil
  modified_base 40..41: mod_base = OTHER; note = uracil
  modified_base 43..44: mod_base = OTHER; note = uracil
  modified_base 47: mod_base = OTHER; note = uracil
  modified_base 54..55: mod_base = OTHER; note = uracil
  modified_base 58: mod_base = OTHER; note = uracil
  modified_base 62..63: mod_base = OTHER; note = uracil
  modified_base 70..71: mod_base = OTHER; note = uracil
  modified_base 78: mod_base = OTHER; note = uracil
  modified_base 80: mod_base = OTHER; note = uracil
  modified_base 82..83: mod_base = OTHER; note = uracil
  modified_base 85: mod_base = OTHER; note = uracil
  modified_base 89: mod_base = OTHER; note = uracil
  modified_base 91: mod_base = OTHER; note = uracil
  modified_base 98..99: mod_base = OTHER; note = uracil
  modified_base 105: mod_base = OTHER; note = uracil
  modified_base 107: mod_base = OTHER; note = uracil
  modified_base 111: mod_base = OTHER; note = uracil
  modified_base 113: mod_base = OTHER; note = uracil
  modified_base 115..116: mod_base = OTHER; note = uracil
  modified_base 118: mod_base = OTHER; note = uracil
  modified_base 121..122: mod_base = OTHER; note = uracil
  modified_base 124..125: mod_base = OTHER; note = uracil
  modified_base 127: mod_base = OTHER; note = uracil
  modified_base 129: mod_base = OTHER; note = uracil
  modified_base 131: mod_base = OTHER; note = uracil
  modified_base 133..134: mod_base = OTHER; note = uracil
  modified_base 139..140: mod_base = OTHER; note = uracil
  modified_base 145..146: mod_base = OTHER; note = uracil
  modified_base 149: mod_base = OTHER; note = uracil
  modified_base 152: mod_base = OTHER; note = uracil
  modified_base 154..155: mod_base = OTHER; note = uracil
  modified_base 160..161: mod_base = OTHER; note = uracil
  modified_base 163..164: mod_base = OTHER; note = uracil
  modified_base 169: mod_base = OTHER; note = uracil
  modified_base 174: mod_base = OTHER; note = uracil
  modified_base 176: mod_base = OTHER; note = uracil
  modified_base 190..191: mod_base = OTHER; note = uracil
  modified_base 195: mod_base = OTHER; note = uracil
  modified_base 198: mod_base = OTHER; note = uracil
  modified_base 203: mod_base = OTHER; note = uracil
  modified_base 208: mod_base = OTHER; note = uracil
  modified_base 214..215: mod_base = OTHER; note = uracil
  modified_base 222..223: mod_base = OTHER; note = uracil
  modified_base 228..230: mod_base = OTHER; note = uracil
  modified_base 232..235: mod_base = OTHER; note = uracil
  modified_base 238: mod_base = OTHER; note = uracil
  modified_base 240: mod_base = OTHER; note = uracil
  modified_base 244: mod_base = OTHER; note = uracil
  modified_base 247..248: mod_base = OTHER; note = uracil
  modified_base 250..253: mod_base = OTHER; note = uracil
  modified_base 259: mod_base = OTHER; note = uracil
  modified_base 261: mod_base = OTHER; note = uracil
  modified_base 265: mod_base = OTHER; note = uracil
  modified_base 276: mod_base = OTHER; note = uracil
  modified_base 280: mod_base = OTHER; note = uracil
  modified_base 286: mod_base = OTHER; note = uracil
  modified_base 288: mod_base = OTHER; note = uracil
  modified_base 291..295: mod_base = OTHER; note = uracil
  modified_base 297..299: mod_base = OTHER; note = uracil
  modified_base 6: mod_base = m5c
  modified_base 9: mod_base = m5c
  modified_base 108: mod_base = m5c
  modified_base 156: mod_base = m5c
  modified_base 225: mod_base = m5c
  modified_base 267: mod_base = m5c
  modified_base 270: mod_base = m5c
  variation 150: note = CpG site, residue is C if methylated or T(=U) if unmethylated
agttacggcgattattaggtttatttttttttattttttttttttgtaggtggttttttggttagtgtgtttgagtgtttattttttgttttagtgttttggtgtttcggtttttttttttttttttatttttttgggtttgggtttgtygttttcgggtttttaggtttagatataagggttgaatgattagattgttggtttgtttagtttttatgtggtttcggtttattttagttttggttgtttttttaaagttttaattacgacgagattatatagtaattttgtttttttttt

SEQ ID NO: 178 - DNA, 300 bp, synthetic construct
  source 1..300: mol_type = other DNA
  modified_base 11: mod_base = OTHER; note = uracil
  modified_base 19: mod_base = OTHER; note = uracil
  modified_base 28: mod_base = OTHER; note = uracil
  modified_base 44: mod_base = OTHER; note = uracil
  modified_base 55: mod_base = OTHER; note = uracil
  modified_base 58..59: mod_base = OTHER; note = uracil
  modified_base 64: mod_base = OTHER; note = uracil
  modified_base 74: mod_base = OTHER; note = uracil
  modified_base 80..81: mod_base = OTHER; note = uracil
  modified_base 83: mod_base = OTHER; note = uracil
  modified_base 91: mod_base = OTHER; note = uracil
  modified_base 96: mod_base = OTHER; note = uracil
  modified_base 100..101: mod_base = OTHER; note = uracil
  modified_base 104: mod_base = OTHER; note = uracil
  modified_base 108: mod_base = OTHER; note = uracil
  modified_base 113: mod_base = OTHER; note = uracil
  modified_base 117: mod_base = OTHER; note = uracil
  modified_base 120..122: mod_base = OTHER; note = uracil
  modified_base 129: mod_base = OTHER; note = uracil
  modified_base 134..135: mod_base = OTHER; note = uracil
  modified_base 142..143: mod_base = OTHER; note = uracil
  modified_base 153: mod_base = OTHER; note = uracil
  modified_base 157..159: mod_base = OTHER; note = uracil
  modified_base 163..165: mod_base = OTHER; note = uracil
  modified_base 191: mod_base = OTHER; note = uracil
  modified_base 197: mod_base = OTHER; note = uracil
  modified_base 199..200: mod_base = OTHER; note = uracil
  modified_base 205: mod_base = OTHER; note = uracil
  modified_base 207: mod_base = OTHER; note = uracil
  modified_base 213: mod_base = OTHER; note = uracil
  modified_base 224: mod_base = OTHER; note = uracil
  modified_base 226: mod_base = OTHER; note = uracil
  modified_base 228: mod_base = OTHER; note = uracil
  modified_base 232: mod_base = OTHER; note = uracil
  modified_base 234: mod_base = OTHER; note = uracil
  modified_base 236: mod_base = OTHER; note = uracil
  modified_base 240..241: mod_base = OTHER; note = uracil
  modified_base 248..249: mod_base = OTHER; note = uracil
  modified_base 251..252: mod_base = OTHER; note = uracil
  modified_base 255: mod_base = OTHER; note = uracil
  modified_base 282..283: mod_base = OTHER; note = uracil
  modified_base 293: mod_base = OTHER; note = uracil
  modified_base 299: mod_base = OTHER; note = uracil
  modified_base 30: mod_base = m5c
  modified_base 33: mod_base = m5c
  modified_base 75: mod_base = m5c
  modified_base 144: mod_base = m5c
  modified_base 192: mod_base = m5c
  modified_base 291: mod_base = m5c
  modified_base 294: mod_base = m5c
  variation 150: note = CpG site, residue is C if methylated or T(=U) if unmethylated
agggagggggtagagttattgtatgatttcgtcgtgattgagattttggggaggtagttagagttggggtgggtcgaggttatatggaaattgaatagattagtagtttggttatttaatttttgtgtttagatttggaggttcgggagyggtaggtttaggtttaggagagtgaggaggaagaggagagtcggagtattaggatattagagtaagaggtgagtatttaggtatattggttagaaggttatttgtaggaggaggaggtgggggaggatggatttggtggtcgtcgtggtt

SEQ ID NO: 179 - DNA, 300 bp, synthetic construct
  source 1..300: mol_type = other DNA
  modified_base 11: mod_base = OTHER; note = uracil
  modified_base 14: mod_base = OTHER; note = uracil
  modified_base 17..19: mod_base = OTHER; note = uracil
  modified_base 21: mod_base = OTHER; note = uracil
  modified_base 23: mod_base = OTHER; note = uracil
  modified_base 25..26: mod_base = OTHER; note = uracil
  modified_base 28: mod_base = OTHER; note = uracil
  modified_base 31..33: mod_base = OTHER; note = uracil
  modified_base 36: mod_base = OTHER; note = uracil
  modified_base 39: mod_base = OTHER; note = uracil
  modified_base 44..46: mod_base = OTHER; note = uracil
  modified_base 50: mod_base = OTHER; note = uracil
  modified_base 56: mod_base = OTHER; note = uracil
  modified_base 58..59: mod_base = OTHER; note = uracil
  modified_base 68: mod_base = OTHER; note = uracil
  modified_base 74..75: mod_base = OTHER; note = uracil
  modified_base 77: mod_base = OTHER; note = uracil
  modified_base 81..82: mod_base = OTHER; note = uracil
  modified_base 86: mod_base = OTHER; note = uracil
  modified_base 88..89: mod_base = OTHER; note = uracil
  modified_base 92..93: mod_base = OTHER; note = uracil
  modified_base 95..96: mod_base = OTHER; note = uracil
  modified_base 99: mod_base = OTHER; note = uracil
  modified_base 101..102: mod_base = OTHER; note = uracil
  modified_base 105: mod_base = OTHER; note = uracil
  modified_base 108: mod_base = OTHER; note = uracil
  modified_base 112: mod_base = OTHER; note = uracil
  modified_base 120..121: mod_base = OTHER; note = uracil
  modified_base 123: mod_base = OTHER; note = uracil
  modified_base 126..127: mod_base = OTHER; note = uracil
  modified_base 132: mod_base = OTHER; note = uracil
  modified_base 139: mod_base = OTHER; note = uracil
  modified_base 144: mod_base = OTHER; note = uracil
  modified_base 153..154: mod_base = OTHER; note = uracil
  modified_base 161..162: mod_base = OTHER; note = uracil
  modified_base 169: mod_base = OTHER; note = uracil
  modified_base 171: mod_base = OTHER; note = uracil
  modified_base 174: mod_base = OTHER; note = uracil
  modified_base 186: mod_base = OTHER; note = uracil
  modified_base 190: mod_base = OTHER; note = uracil
  modified_base 202: mod_base = OTHER; note = uracil
  modified_base 206: mod_base = OTHER; note = uracil
  modified_base 211: mod_base = OTHER; note = uracil
  modified_base 221: mod_base = OTHER; note = uracil
  modified_base 228: mod_base = OTHER; note = uracil
  modified_base 231..233: mod_base = OTHER; note = uracil
  modified_base 235: mod_base = OTHER; note = uracil
  modified_base 245: mod_base = OTHER; note = uracil
  modified_base 249: mod_base = OTHER; note = uracil
  modified_base 259: mod_base = OTHER; note = uracil
  modified_base 263: mod_base = OTHER; note = uracil
  modified_base 265: mod_base = OTHER; note = uracil
  modified_base 272: mod_base = OTHER; note = uracil
  modified_base 284: mod_base = OTHER; note = uracil
  modified_base 293: mod_base = OTHER; note = uracil
  modified_base 299: mod_base = OTHER; note = uracil
  modified_base 40: mod_base = m5c
  modified_base 133: mod_base = m5c
  modified_base 273: mod_base = m5c
  variation 149: note = CpG site, residue is C if methylated or T(=U) if unmethylated
  variation 177: note = CpG site, residue is C if methylated or T(=U) if unmethylated
  variation 237: note = CpG site, residue is C if methylated or T(=U) if unmethylated
aaggtgaatgttgtaattttttttttttagttttgtagtcgatttttgatataaattttttgaagtttagtggtttttttttatgtatttattatttatatttgttgtttttaaagaaattataatttggatcgggaatagaattggaygtgttaaaatgtttgaggatattttatygaatgtggttggtttgatgggaagttggtatgattagaaatgttaggagttttttttttygaggttttaagttttgtgtttttgatttaatggttcggattgagattagatgagttaagttta

SEQ ID NO: 180 - DNA, 300 bp, synthetic construct
  source 1..300: mol_type = other DNA
  modified_base 4: mod_base = OTHER; note = uracil
  modified_base 9: mod_base = OTHER; note = uracil
  modified_base 11: mod_base = OTHER; note = uracil
  modified_base 14: mod_base = OTHER; note = uracil
  modified_base 19: mod_base = OTHER; note = uracil
  modified_base 21: mod_base = OTHER; note = uracil
  modified_base 25: mod_base = OTHER; note = uracil
  modified_base 30..31: mod_base = OTHER; note = uracil
  modified_base 39: mod_base = OTHER; note = uracil
  modified_base 45: mod_base = OTHER; note = uracil
  modified_base 47: mod_base = OTHER; note = uracil
  modified_base 52: mod_base = OTHER; note = uracil
  modified_base 59..60: mod_base = OTHER; note = uracil
  modified_base 74: mod_base = OTHER; note = uracil
  modified_base 76..77: mod_base = OTHER; note = uracil
  modified_base 81: mod_base = OTHER; note = uracil
  modified_base 86: mod_base = OTHER; note = uracil
  modified_base 91: mod_base = OTHER; note = uracil
  modified_base 95..96: mod_base = OTHER; note = uracil
  modified_base 99: mod_base = OTHER; note = uracil
  modified_base 102..104: mod_base = OTHER; note = uracil
  modified_base 107: mod_base = OTHER; note = uracil
  modified_base 111..112: mod_base = OTHER; note = uracil
  modified_base 115..116: mod_base = OTHER; note = uracil
  modified_base 118: mod_base = OTHER; note = uracil
  modified_base 133..134: mod_base = OTHER; note = uracil
  modified_base 136: mod_base = OTHER; note = uracil
  modified_base 140: mod_base = OTHER; note = uracil
  modified_base 148: mod_base = OTHER; note = uracil
  modified_base 153..154: mod_base = OTHER; note = uracil
  modified_base 159: mod_base = OTHER; note = uracil
  modified_base 164..165: mod_base = OTHER; note = uracil
  modified_base 170..171: mod_base = OTHER; note = uracil
  modified_base 184: mod_base = OTHER; note = uracil
  modified_base 193: mod_base = OTHER; note = uracil
  modified_base 196: mod_base = OTHER; note = uracil
  modified_base 215: mod_base = OTHER; note = uracil
  modified_base 227..228: mod_base = OTHER; note = uracil
  modified_base 230: mod_base = OTHER; note = uracil
  modified_base 235: mod_base = OTHER; note = uracil
  modified_base 238: mod_base = OTHER; note = uracil
  modified_base 252: mod_base = OTHER; note = uracil
  modified_base 262: mod_base = OTHER; note = uracil
  modified_base 265: mod_base = OTHER; note = uracil
  modified_base 270: mod_base = OTHER; note = uracil
  modified_base 287: mod_base = OTHER; note = uracil
  modified_base 290: mod_base = OTHER; note = uracil
  modified_base 294: mod_base = OTHER; note = uracil
  modified_base 296..297: mod_base = OTHER; note = uracil
  modified_base 300: mod_base = OTHER; note = uracil
  modified_base 26: mod_base = m5c
  modified_base 166: mod_base = m5c
  modified_base 259: mod_base = m5c
  variation 62: note = CpG site, residue is C if methylated or T(=U) if unmethylated
  variation 122: note = CpG site, residue is C if methylated or T(=U) if unmethylated
  variation 150: note = CpG site, residue is C if methylated or T(=U) if unmethylated
gaatttgatttatttgattttaattcggattattgagttagaaatataaagtttgaaatttygagagggaagatttttgatatttttagttatgttagttttttattaagttagttatattygatgaagtgtttttaggtattttggtaygtttagttttgttttcggtttaggttgtggtttttttgaaagtagtaggtgtaggtggtaggtgtatggaaagaggttattgaattttaaggagtttatgttagggatcggttgtagggttgaggagagagggttgtagtatttattttt

SEQ ID NO: 181 - DNA, 300 bp, synthetic construct
  source 1..300: mol_type = other DNA
  modified_base 1: mod_base = OTHER; note = uracil
  modified_base 4..6: mod_base = OTHER; note = uracil
  modified_base 9: mod_base = OTHER; note = uracil
  modified_base 12: mod_base = OTHER; note = uracil
  modified_base 17..19: mod_base = OTHER; note = uracil
  modified_base 23: mod_base = OTHER; note = uracil
  modified_base 29: mod_base = OTHER; note = uracil
  modified_base 31..32: mod_base = OTHER; note = uracil
  modified_base 41: mod_base = OTHER; note = uracil
  modified_base 47..48: mod_base = OTHER; note = uracil
  modified_base 50: mod_base = OTHER; note = uracil
  modified_base 54..55: mod_base = OTHER; note = uracil
  modified_base 59: mod_base = OTHER; note = uracil
  modified_base 61..62: mod_base = OTHER; note = uracil
  modified_base 65..66: mod_base = OTHER; note = uracil
  modified_base 68..69: mod_base = OTHER; note = uracil
  modified_base 72: mod_base = OTHER; note = uracil
  modified_base 74..75: mod_base = OTHER; note = uracil
  modified_base 78: mod_base = OTHER; note = uracil
  modified_base 81: mod_base = OTHER; note = uracil
  modified_base 85: mod_base = OTHER; note = uracil
  modified_base 93..94: mod_base = OTHER; note = uracil
  modified_base 96: mod_base = OTHER; note = uracil
  modified_base 99..100: mod_base = OTHER; note = uracil
  modified_base 105: mod_base = OTHER; note = uracil
  modified_base 112: mod_base = OTHER; note = uracil
  modified_base 117: mod_base = OTHER; note = uracil
  modified_base 126..127: mod_base = OTHER; note = uracil
  modified_base 134..135: mod_base = OTHER; note = uracil
  modified_base 142: mod_base = OTHER; note = uracil
  modified_base 144: mod_base = OTHER; note = uracil
  modified_base 147: mod_base = OTHER; note = uracil
  modified_base 159: mod_base = OTHER; note = uracil
  modified_base 163: mod_base = OTHER; note = uracil
  modified_base 175: mod_base = OTHER; note = uracil
  modified_base 179: mod_base = OTHER; note = uracil
  modified_base 184: mod_base = OTHER; note = uracil
  modified_base 194: mod_base = OTHER; note = uracil
  modified_base 201: mod_base = OTHER; note = uracil
  modified_base 204..206: mod_base = OTHER; note = uracil
  modified_base 208: mod_base = OTHER; note = uracil
  modified_base 218: mod_base = OTHER; note = uracil
  modified_base 222: mod_base = OTHER; note = uracil
  modified_base 232: mod_base = OTHER; note = uracil
  modified_base 236: mod_base = OTHER; note = uracil
  modified_base 238: mod_base = OTHER; note = uracil
  modified_base 245: mod_base = OTHER; note = uracil
  modified_base 257: mod_base = OTHER; note = uracil
  modified_base 266: mod_base = OTHER; note = uracil
  modified_base 272: mod_base = OTHER; note = uracil
  modified_base 279..280: mod_base = OTHER; note = uracil
  modified_base 284: mod_base = OTHER; note = uracil
  modified_base 288..289: mod_base = OTHER; note = uracil
  modified_base 13: mod_base = m5c
  modified_base 106: mod_base = m5c
  modified_base 246: mod_base = m5c
  variation 122: note = CpG site, residue is C if methylated or T(=U) if unmethylated
  variation 150: note = CpG site, residue is C if methylated or T(=U) if unmethylated
  variation 210: note = CpG site, residue is C if methylated or T(=U) if unmethylated
tagttttgtagtcgatttttgatataaattttttgaagtttagtggtttttttttatgtatttattatttatatttgttgtttttaaagaaattataatttggatcgggaatagaattggaygtgttaaaatgtttgaggatattttatygaatgtggttggtttgatgggaagttggtatgattagaaatgttaggagttttttttttygaggttttaagttttgtgtttttgatttaatggttcggattgagattagatgagttaagtttagatgattatgtaaatttttagatgggg

SEQ ID NO: 182 - DNA, 300 bp, synthetic construct
  source 1..300: mol_type = other DNA
  modified_base 1..4: mod_base = OTHER; note = uracil
  modified_base 7: mod_base = OTHER; note = uracil
  modified_base 18: mod_base = OTHER; note = uracil
  modified_base 24: mod_base = OTHER; note = uracil
  modified_base 27: mod_base = OTHER; note = uracil
  modified_base 32: mod_base = OTHER; note = uracil
  modified_base 37: mod_base = OTHER; note = uracil
  modified_base 39: mod_base = OTHER; note = uracil
  modified_base 42: mod_base = OTHER; note = uracil
  modified_base 47: mod_base = OTHER; note = uracil
  modified_base 49: mod_base = OTHER; note = uracil
  modified_base 53: mod_base = OTHER; note = uracil
  modified_base 58..59: mod_base = OTHER; note = uracil
  modified_base 67: mod_base = OTHER; note = uracil
  modified_base 73: mod_base = OTHER; note = uracil
  modified_base 75: mod_base = OTHER; note = uracil
  modified_base 80: mod_base = OTHER; note = uracil
  modified_base 87..88: mod_base = OTHER; note = uracil
  modified_base 102: mod_base = OTHER; note = uracil
  modified_base 104..105: mod_base = OTHER; note = uracil
  modified_base 109: mod_base = OTHER; note = uracil
  modified_base 114: mod_base = OTHER; note = uracil
  modified_base 119: mod_base = OTHER; note = uracil
  modified_base 123..124: mod_base = OTHER; note = uracil
  modified_base 127: mod_base = OTHER; note = uracil
  modified_base 130..132: mod_base = OTHER; note = uracil
  modified_base 135: mod_base = OTHER; note = uracil
  modified_base 139..140: mod_base = OTHER; note = uracil
  modified_base 143..144: mod_base = OTHER; note = uracil
  modified_base 146: mod_base = OTHER; note = uracil
  modified_base 161..162: mod_base = OTHER; note = uracil
  modified_base 164: mod_base = OTHER; note = uracil
  modified_base 168: mod_base = OTHER; note = uracil
  modified_base 176: mod_base = OTHER; note = uracil
  modified_base 181..182: mod_base = OTHER; note = uracil
  modified_base 187: mod_base = OTHER; note = uracil
  modified_base 192..193: mod_base = OTHER; note = uracil
  modified_base 198..199: mod_base = OTHER; note = uracil
  modified_base 212: mod_base = OTHER; note = uracil
  modified_base 221: mod_base = OTHER; note = uracil
  modified_base 224: mod_base = OTHER; note = uracil
  modified_base 243: mod_base = OTHER; note = uracil
  modified_base 255..256: mod_base = OTHER; note = uracil
  modified_base 258: mod_base = OTHER; note = uracil
  modified_base 263: mod_base = OTHER; note = uracil
  modified_base 266: mod_base = OTHER; note = uracil
  modified_base 280: mod_base = OTHER; note = uracil
  modified_base 290: mod_base = OTHER; note = uracil
  modified_base 293: mod_base = OTHER; note = uracil
  modified_base 298: mod_base = OTHER; note = uracil
  modified_base 54: mod_base = m5c
  modified_base 194: mod_base = m5c
  modified_base 287: mod_base = m5c
  variation 90: note = CpG site, residue is C if methylated or T(=U) if unmethylated
  variation 150: note = CpG site, residue is C if methylated or T(=U) if unmethylated
  variation 178: note = CpG site, residue is C if methylated or T(=U) if unmethylated
ttttatttaaaggtttgtatggttatttgaatttgatttatttgattttaattcggattattgagttagaaatataaagtttgaaatttygagagggaagatttttgatatttttagttatgttagttttttattaagttagttatattygatgaagtgtttttaggtattttggtaygtttagttttgttttcggtttaggttgtggtttttttgaaagtagtaggtgtaggtggtaggtgtatggaaagaggttattgaattttaaggagtttatgttagggatcggttgtagggttg

SEQ ID NO: 183 - DNA, 300 bp, synthetic construct
  source 1..300: mol_type = other DNA
  modified_base 1..2: mod_base = OTHER; note = uracil
  modified_base 5..6: mod_base = OTHER; note = uracil
  modified_base 8..9: mod_base = OTHER; note = uracil
  modified_base 12: mod_base = OTHER; note = uracil
  modified_base 14..15: mod_base = OTHER; note = uracil
  modified_base 18: mod_base = OTHER; note = uracil
  modified_base 21: mod_base = OTHER; note = uracil
  modified_base 25: mod_base = OTHER; note = uracil
  modified_base 33..34: mod_base = OTHER; note = uracil
  modified_base 36: mod_base = OTHER; note = uracil
  modified_base 39..40: mod_base = OTHER; note = uracil
  modified_base 45: mod_base = OTHER; note = uracil
  modified_base 52: mod_base = OTHER; note = uracil
  modified_base 57: mod_base = OTHER; note = uracil
  modified_base 66..67: mod_base = OTHER; note = uracil
  modified_base 74..75: mod_base = OTHER; note = uracil
  modified_base 82: mod_base = OTHER; note = uracil
  modified_base 84: mod_base = OTHER; note = uracil
  modified_base 87: mod_base = OTHER; note = uracil
  modified_base 99: mod_base = OTHER; note = uracil
  modified_base 103: mod_base = OTHER; note = uracil
  modified_base 115: mod_base = OTHER; note = uracil
  modified_base 119: mod_base = OTHER; note = uracil
  modified_base 124: mod_base = OTHER; note = uracil
  modified_base 134: mod_base = OTHER; note = uracil
  modified_base 141: mod_base = OTHER; note = uracil
  modified_base 144..146: mod_base = OTHER; note = uracil
  modified_base 148: mod_base = OTHER; note = uracil
  modified_base 158: mod_base = OTHER; note = uracil
  modified_base 162: mod_base = OTHER; note = uracil
  modified_base 172: mod_base = OTHER; note = uracil
  modified_base 176: mod_base = OTHER; note = uracil
  modified_base 178: mod_base = OTHER; note = uracil
  modified_base 185: mod_base = OTHER; note = uracil
  modified_base 197: mod_base = OTHER; note = uracil
  modified_base 206: mod_base = OTHER; note = uracil
  modified_base 212: mod_base = OTHER; note = uracil
  modified_base 219..220: mod_base = OTHER; note = uracil
  modified_base 224: mod_base = OTHER; note = uracil
  modified_base 228..229: mod_base = OTHER; note = uracil
  modified_base 241..242: mod_base = OTHER; note = uracil
  modified_base 248..249: mod_base = OTHER; note = uracil
  modified_base 254: mod_base = OTHER; note = uracil
  modified_base 261: mod_base = OTHER; note = uracil
  modified_base 263: mod_base = OTHER; note = uracil
  modified_base 267..268: mod_base = OTHER; note = uracil
  modified_base 272..273: mod_base = OTHER; note = uracil
  modified_base 283: mod_base = OTHER; note = uracil
  modified_base 286: mod_base = OTHER; note = uracil
  modified_base 288..289: mod_base = OTHER; note = uracil
  modified_base 46: mod_base = m5c
  modified_base 186: mod_base = m5c
  variation 62: note = CpG site, residue is C if methylated or T(=U) if unmethylated
  variation 90: note = CpG site, residue is C if methylated or T(=U) if unmethylated
  variation 150: note = CpG site, residue is C if methylated or T(=U) if unmethylated
tttattatttatatttgttgtttttaaagaaattataatttggatcgggaatagaattggaygtgttaaaatgtttgaggatattttatygaatgtggttggtttgatgggaagttggtatgattagaaatgttaggagttttttttttygaggttttaagttttgtgtttttgatttaatggttcggattgagattagatgagttaagtttagatgattatgtaaatttttagatggggtttaaaattaaatttgtgtttttaaattattttaaatgtgtttattattagttatagttt

SEQ ID NO: 184 - DNA, 300 bp, synthetic construct
  source 1..300: mol_type = other DNA
  modified_base 4: mod_base = OTHER; note = uracil
  modified_base 10: mod_base = OTHER; note = uracil
  modified_base 21: mod_base = OTHER; note = uracil
  modified_base 23: mod_base = OTHER; note = uracil
  modified_base 43: mod_base = OTHER; note = uracil
  modified_base 45: mod_base = OTHER; note = uracil
  modified_base 61..64: mod_base = OTHER; note = uracil
  modified_base 67: mod_base = OTHER; note = uracil
  modified_base 78: mod_base = OTHER; note = uracil
  modified_base 84: mod_base = OTHER; note = uracil
  modified_base 87: mod_base = OTHER; note = uracil
  modified_base 92: mod_base = OTHER; note = uracil
  modified_base 97: mod_base = OTHER; note = uracil
  modified_base 99: mod_base = OTHER; note = uracil
  modified_base 102: mod_base = OTHER; note = uracil
  modified_base 107: mod_base = OTHER; note = uracil
  modified_base 109: mod_base = OTHER; note = uracil
  modified_base 113: mod_base = OTHER; note = uracil
  modified_base 118..119: mod_base = OTHER; note = uracil
  modified_base 127: mod_base = OTHER; note = uracil
  modified_base 133: mod_base = OTHER; note = uracil
  modified_base 135: mod_base = OTHER; note = uracil
  modified_base 140: mod_base = OTHER; note = uracil
  modified_base 147..148: mod_base = OTHER; note = uracil
  modified_base 162: mod_base = OTHER; note = uracil
  modified_base 164..165: mod_base = OTHER; note = uracil
  modified_base 169: mod_base = OTHER; note = uracil
  modified_base 174: mod_base = OTHER; note = uracil
  modified_base 179: mod_base = OTHER; note = uracil
  modified_base 183..184: mod_base = OTHER; note = uracil
  modified_base 187: mod_base = OTHER; note = uracil
  modified_base 190..192: mod_base = OTHER; note = uracil
  modified_base 195: mod_base = OTHER; note = uracil
  modified_base 199..200: mod_base = OTHER; note = uracil
  modified_base 203..204: mod_base = OTHER; note = uracil
  modified_base 206: mod_base = OTHER; note = uracil
  modified_base 221..222: mod_base = OTHER; note = uracil
  modified_base 224: mod_base = OTHER; note = uracil
  modified_base 228: mod_base = OTHER; note = uracil
  modified_base 236: mod_base = OTHER; note = uracil
  modified_base 241..242: mod_base = OTHER; note = uracil
  modified_base 247: mod_base = OTHER; note = uracil
  modified_base 252..253: mod_base = OTHER; note = uracil
  modified_base 258..259: mod_base = OTHER; note = uracil
  modified_base 272: mod_base = OTHER; note = uracil
  modified_base 281: mod_base = OTHER; note = uracil
  modified_base 284: mod_base = OTHER; note = uracil
  modified_base 114: mod_base = m5c
  modified_base 254: mod_base = m5c
  variation 150: note = CpG site, residue is C if methylated or T(=U) if unmethylated
  variation 210: note = CpG site, residue is C if methylated or T(=U) if unmethylated
  variation 238: note = CpG site, residue is C if methylated or T(=U) if unmethylated
aaattataattggtgatgaatatatttggaatggtttgagaatatagatttggttttaggttttatttaaaggtttgtatggttatttgaatttgatttatttgattttaattcggattattgagttagaaatataaagtttgaaatttygagagggaagatttttgatatttttagttatgttagttttttattaagttagttatattygatgaagtgtttttaggtattttggtaygtttagttttgttttcggtttaggttgtggtttttttgaaagtagtaggtgtaggtggtagg

SEQ ID NO: 185 - DNA, 300 bp, synthetic construct
  source 1..300: mol_type = other DNA
  modified_base 15: mod_base = OTHER; note = uracil
  modified_base 19..20: mod_base = OTHER; note = uracil
  modified_base 22..23: mod_base = OTHER; note = uracil
  modified_base 26: mod_base = OTHER; note = uracil
  modified_base 28..29: mod_base = OTHER; note = uracil
  modified_base 34..35: mod_base = OTHER; note = uracil
  modified_base 39: mod_base = OTHER; note = uracil
  modified_base 45: mod_base = OTHER; note = uracil
  modified_base 50..51: mod_base = OTHER; note = uracil
  modified_base 54..55: mod_base = OTHER; note = uracil
  modified_base 62: mod_base = OTHER; note = uracil
  modified_base 69..70: mod_base = OTHER; note = uracil
  modified_base 74: mod_base = OTHER; note = uracil
  modified_base 78..79: mod_base = OTHER; note = uracil
  modified_base 88: mod_base = OTHER; note = uracil
  modified_base 91..92: mod_base = OTHER; note = uracil
  modified_base 99: mod_base = OTHER; note = uracil
  modified_base 106: mod_base = OTHER; note = uracil
  modified_base 111: mod_base = OTHER; note = uracil
  modified_base 114: mod_base = OTHER; note = uracil
  modified_base 123: mod_base = OTHER; note = uracil
  modified_base 127: mod_base = OTHER; note = uracil
  modified_base 134: mod_base = OTHER; note = uracil
  modified_base 146..147: mod_base = OTHER; note = uracil
  modified_base 157: mod_base = OTHER; note = uracil
  modified_base 160..162: mod_base = OTHER; note = uracil
  modified_base 164: mod_base = OTHER; note = uracil
  modified_base 166: mod_base = OTHER; note = uracil
  modified_base 176: mod_base = OTHER; note = uracil
  modified_base 180: mod_base = OTHER; note = uracil
  modified_base 189: mod_base = OTHER; note = uracil
  modified_base 193: mod_base = OTHER; note = uracil
  modified_base 198: mod_base = OTHER; note = uracil
  modified_base 200: mod_base = OTHER; note = uracil
  modified_base 203: mod_base = OTHER; note = uracil
  modified_base 210..213: mod_base = OTHER; note = uracil
  modified_base 217: mod_base = OTHER; note = uracil
  modified_base 230..231: mod_base = OTHER; note = uracil
  modified_base 240..242: mod_base = OTHER; note = uracil
  modified_base 254: mod_base = OTHER; note = uracil
  modified_base 259..260: mod_base = OTHER; note = uracil
  modified_base 263..268: mod_base = OTHER; note = uracil
  modified_base 285..286: mod_base = OTHER; note = uracil
  modified_base 288..289: mod_base = OTHER; note = uracil
  modified_base 295: mod_base = OTHER; note = uracil
  modified_base 16: mod_base = m5c
  modified_base 30: mod_base = m5c
  modified_base 41: mod_base = m5c
  modified_base 47: mod_base = m5c
  modified_base 115: mod_base = m5c
  modified_base 141: mod_base = m5c
  modified_base 153: mod_base = m5c
  modified_base 155: mod_base = m5c
  modified_base 171: mod_base = m5c
  modified_base 191: mod_base = m5c
  modified_base 194: mod_base = m5c
  modified_base 215: mod_base = m5c
  modified_base 228: mod_base = m5c
  modified_base 232: mod_base = m5c
  modified_base 235: mod_base = m5c
  modified_base 256: mod_base = m5c
  modified_base 278: mod_base = m5c
  variation 151: note = CpG site, residue is C if methylated or T(=U) if unmethylated
gagaggggaaggggtcgattatttgttttcgagttattttcgggttcggttagttattgggttgggaatttgttaattttggttgattttttaatgagttgtgaattggtttttcgggaggatttataggaggttggaaacggggtttggygcgcgttttttttttagtgcgaggttgattggttggattcgtcgggttttattgtgggttttacgttatgtttagacgttcgacgtgttttattttattgaattcgttttgttttttaagtagggacgatttatttttattttttagat

SEQ ID NO: 186 - DNA, 300 bp, synthetic construct
  source 1..300: mol_type = other DNA
  modified_base 3: mod_base = OTHER; note = uracil
  modified_base 25..27: mod_base = OTHER; note = uracil
  modified_base 30: mod_base = OTHER; note = uracil
  modified_base 39: mod_base = OTHER; note = uracil
  modified_base 50: mod_base = OTHER; note = uracil
  modified_base 63: mod_base = OTHER; note = uracil
  modified_base 75: mod_base = OTHER; note = uracil
  modified_base 80: mod_base = OTHER; note = uracil
  modified_base 92..94: mod_base = OTHER; note = uracil
  modified_base 96: mod_base = OTHER; note = uracil
  modified_base 104..105: mod_base = OTHER; note = uracil
  modified_base 114..115: mod_base = OTHER; note = uracil
  modified_base 118..119: mod_base = OTHER; note = uracil
  modified_base 123: mod_base = OTHER; note = uracil
  modified_base 126..127: mod_base = OTHER; note = uracil
  modified_base 131: mod_base = OTHER; note = uracil
  modified_base 133: mod_base = OTHER; note = uracil
  modified_base 151..152: mod_base = OTHER; note = uracil
  modified_base 156..158: mod_base = OTHER; note = uracil
  modified_base 164..165: mod_base = OTHER; note = uracil
  modified_base 168..169: mod_base = OTHER; note = uracil
  modified_base 171..172: mod_base = OTHER; note = uracil
  modified_base 180..181: mod_base = OTHER; note = uracil
  modified_base 183..184: mod_base = OTHER; note = uracil
  modified_base 192..193: mod_base = OTHER; note = uracil
  modified_base 198: mod_base = OTHER; note = uracil
  modified_base 200: mod_base = OTHER; note = uracil
  modified_base 203: mod_base = OTHER; note = uracil
  modified_base 205: mod_base = OTHER; note = uracil
  modified_base 216: mod_base = OTHER; note = uracil
  modified_base 219..220: mod_base = OTHER; note = uracil
  modified_base 229: mod_base = OTHER; note = uracil
  modified_base 235..237: mod_base = OTHER; note = uracil
  modified_base 240..242: mod_base = OTHER; note = uracil
  modified_base 248: mod_base = OTHER; note = uracil
  modified_base 252: mod_base = OTHER; note = uracil
  modified_base 257..258: mod_base = OTHER; note = uracil
  modified_base 268: mod_base = OTHER; note = uracil
  modified_base 276: mod_base = OTHER; note = uracil
  modified_base 287..290: mod_base = OTHER; note = uracil
  modified_base 293..296: mod_base = OTHER; note = uracil
  modified_base 298: mod_base = OTHER; note = uracil
  modified_base 300: mod_base = OTHER; note = uracil
  modified_base 22: mod_base = m5c
  modified_base 44: mod_base = m5c
  modified_base 65: mod_base = m5c
  modified_base 68: mod_base = m5c
  modified_base 72: mod_base = m5c
  modified_base 85: mod_base = m5c
  modified_base 106: mod_base = m5c
  modified_base 109: mod_base = m5c
  modified_base 129: mod_base = m5c
  modified_base 145: mod_base = m5c
  modified_base 147: mod_base = m5c
  modified_base 159: mod_base = m5c
  modified_base 185: mod_base = m5c
  modified_base 253: mod_base = m5c
  modified_base 259: mod_base = m5c
  modified_base 270: mod_base = m5c
  modified_base 284: mod_base = m5c
  variation 149: note = CpG site, residue is C if methylated or T(=U) if unmethylated
atttagaaaatggaggtaaatcgtttttatttggggggtaggacgagtttaataaaatgggatacgtcgggcgtttaaatatagcgtggggtttatagtagagttcggcgagtttaattagttagtttcgtattgagagggaagcgcgygttaggtttcgtttttagttttttgtaagttttttcggaagattagtttatagtttattggaagattaattaggattgataggtttttagtttaatggttggtcgagttcgagaatggttcgggagtaggtggtcggtttttttttttttt

SEQ ID NO: 187 - DNA, 300 bp, synthetic construct
  source 1..300: mol_type = other DNA
  modified_base 7: mod_base = OTHER; note = uracil
  modified_base 14: mod_base = OTHER; note = uracil
  modified_base 18..19: mod_base = OTHER; note = uracil
  modified_base 23: mod_base = OTHER; note = uracil
  modified_base 25: mod_base = OTHER; note = uracil
  modified_base 34: mod_base = OTHER; note = uracil
  modified_base 39: mod_base = OTHER; note = uracil
  modified_base 42: mod_base = OTHER; note = uracil
  modified_base 45: mod_base = OTHER; note = uracil
  modified_base 53: mod_base = OTHER; note = uracil
  modified_base 58: mod_base = OTHER; note = uracil
  modified_base 63: mod_base = OTHER; note = uracil
  modified_base 73: mod_base = OTHER; note = uracil
  modified_base 88..90: mod_base = OTHER; note = uracil
  modified_base 95: mod_base = OTHER; note = uracil
  modified_base 105: mod_base = OTHER; note = uracil
  modified_base 112: mod_base = OTHER; note = uracil
  modified_base 118: mod_base = OTHER; note = uracil
  modified_base 134: mod_base = OTHER; note = uracil
  modified_base 137: mod_base = OTHER; note = uracil
  modified_base 147..150: mod_base = OTHER; note = uracil
  modified_base 154..155: mod_base = OTHER; note = uracil
  modified_base 157: mod_base = OTHER; note = uracil
  modified_base 161: mod_base = OTHER; note = uracil
  modified_base 173: mod_base = OTHER; note = uracil
  modified_base 176..177: mod_base = OTHER; note = uracil
  modified_base 180: mod_base = OTHER; note = uracil
  modified_base 194: mod_base = OTHER; note = uracil
  modified_base 196: mod_base = OTHER; note = uracil
  modified_base 198: mod_base = OTHER; note = uracil
  modified_base 200: mod_base = OTHER; note = uracil
  modified_base 204..205: mod_base = OTHER; note = uracil
  modified_base 220..221: mod_base = OTHER; note = uracil
  modified_base 223: mod_base = OTHER; note = uracil
  modified_base 229: mod_base = OTHER; note = uracil
  modified_base 232..233: mod_base = OTHER; note = uracil
  modified_base 246: mod_base = OTHER; note = uracil
  modified_base 251: mod_base = OTHER; note = uracil
  modified_base 259: mod_base = OTHER; note = uracil
  modified_base 272: mod_base = OTHER; note = uracil
  modified_base 279..282: mod_base = OTHER; note = uracil
  modified_base 289: mod_base = OTHER; note = uracil
  modified_base 1: mod_base = m5c
  modified_base 31: mod_base = m5c
  modified_base 50: mod_base = m5c
  modified_base 56: mod_base = m5c
  modified_base 138: mod_base = m5c
  modified_base 206: mod_base = m5c
  modified_base 224: mod_base = m5c
  modified_base 255: mod_base = m5c
  modified_base 268: mod_base = m5c
  modified_base 286: mod_base = m5c
  variation 151: note = CpG site, residue is C if methylated or T(=U) if unmethylated
cgggggtagggagtagatttgatttagtggcgttagtgttattttaaagcggtagcgtattttattaaaaatttgatgtagaaattattttgggttttgttttgtaaagagtatttgtataagaaaaaataattagtcggttaattttttygtttattggtaggaagagagatagtttttagagagtttgggatttttttattttcggagaattaaaagttttcgagatatttattttagaagttttggttaatcgtttttaaagtgcggttagaagattttttgcgtttgaatggtttg

SEQ ID NO: 188 - DNA, 300 bp, synthetic construct
  source 1..300: mol_type = other DNA
  modified_base 1: mod_base = OTHER; note = uracil
  modified_base 5..6: mod_base = OTHER; note = uracil
  modified_base 10: mod_base = OTHER; note = uracil
  modified_base 16: mod_base = OTHER; note = uracil
  modified_base 24: mod_base = OTHER; note = uracil
  modified_base 27: mod_base = OTHER; note = uracil
  modified_base 31: mod_base = OTHER; note = uracil
  modified_base 34: mod_base = OTHER; note = uracil
  modified_base 36: mod_base = OTHER; note = uracil
  modified_base 52..53: mod_base = OTHER; note = uracil
  modified_base 58: mod_base = OTHER; note = uracil
  modified_base 61: mod_base = OTHER; note = uracil
  modified_base 74: mod_base = OTHER; note = uracil
  modified_base 82: mod_base = OTHER; note = uracil
  modified_base 91: mod_base = OTHER; note = uracil
  modified_base 93: mod_base = OTHER; note = uracil
  modified_base 109..111: mod_base = OTHER; note = uracil
  modified_base 115: mod_base = OTHER; note = uracil
  modified_base 117: mod_base = OTHER; note = uracil
  modified_base 119: mod_base = OTHER; note = uracil
  modified_base 126: mod_base = OTHER; note = uracil
  modified_base 130: mod_base = OTHER; note = uracil
  modified_base 132: mod_base = OTHER; note = uracil
  modified_base 134: mod_base = OTHER; note = uracil
  modified_base 137..138: mod_base = OTHER; note = uracil
  modified_base 141..142: mod_base = OTHER; note = uracil
  modified_base 161: mod_base = OTHER; note = uracil
  modified_base 165: mod_base = OTHER; note = uracil
  modified_base 178: mod_base = OTHER; note = uracil
  modified_base 184: mod_base = OTHER; note = uracil
  modified_base 190: mod_base = OTHER; note = uracil
  modified_base 192: mod_base = OTHER; note = uracil
  modified_base 197: mod_base = OTHER; note = uracil
  modified_base 202: mod_base = OTHER; note = uracil
  modified_base 207..209: mod_base = OTHER; note = uracil
  modified_base 220: mod_base = OTHER; note = uracil
  modified_base 223: mod_base = OTHER; note = uracil
  modified_base 226: mod_base = OTHER; note = uracil
  modified_base 246: mod_base = OTHER; note = uracil
  modified_base 249: mod_base = OTHER; note = uracil
  modified_base 252: mod_base = OTHER; note = uracil
  modified_base 263: mod_base = OTHER; note = uracil
  modified_base 265: mod_base = OTHER; note = uracil
  modified_base 271..272: mod_base = OTHER; note = uracil
  modified_base 274: mod_base = OTHER; note = uracil
  modified_base 280: mod_base = OTHER; note = uracil
  modified_base 285: mod_base = OTHER; note = uracil
  modified_base 288: mod_base = OTHER; note = uracil
  modified_base 290..292: mod_base = OTHER; note = uracil
  modified_base 295..298: mod_base = OTHER; note = uracil
  modified_base 14: mod_base = m5c
  modified_base 32: mod_base = m5c
  modified_base 45: mod_base = m5c
  modified_base 76: mod_base = m5c
  modified_base 94: mod_base = m5c
  modified_base 162: mod_base = m5c
  modified_base 244: mod_base = m5c
  modified_base 250: mod_base = m5c
  modified_base 269: mod_base = m5c
  modified_base 299: mod_base = m5c
  variation 149: note = CpG site, residue is C if methylated or T(=U) if unmethylated
taaattatttagacgtaaggggttttttgatcgtattttaagaacgattgattagaatttttaaaatggatgtttcggaggtttttaatttttcgggaatgagagagttttaaattttttgaaggttgtttttttttttgttagtggaygggggaattaatcggttgattatttttttttatgtaaatgttttttgtaaaataaagtttagggtaatttttatattagatttttaatgaaatgcgttgtcgttttgaagtagtattgacgttattgagttaggtttgttttttgttttcg

SEQ ID NO: 189 - DNA, 300 bp, synthetic construct
  source 1..300: mol_type = other DNA
  modified_base 1: mod_base = OTHER; note = uracil
  modified_base 13..14: mod_base = OTHER; note = uracil
  modified_base 25: mod_base = OTHER; note = uracil
  modified_base 49..50: mod_base = OTHER; note = uracil
  modified_base 54: mod_base = OTHER; note = uracil
  modified_base 56: mod_base = OTHER; note = uracil
  modified_base 62: mod_base = OTHER; note = uracil
  modified_base 66: mod_base = OTHER; note = uracil
  modified_base 71..73: mod_base = OTHER; note = uracil
  modified_base 75..76: mod_base = OTHER; note = uracil
  modified_base 78..79: mod_base = OTHER; note = uracil
  modified_base 81..82: mod_base = OTHER; note = uracil
  modified_base 84..86: mod_base = OTHER; note = uracil
  modified_base 89: mod_base = OTHER; note = uracil
  modified_base 91: mod_base = OTHER; note = uracil
  modified_base 95..98: mod_base = OTHER; note = uracil
  modified_base 100..101: mod_base = OTHER; note = uracil
  modified_base 106: mod_base = OTHER; note = uracil
  modified_base 108..110: mod_base = OTHER; note = uracil
  modified_base 114: mod_base = OTHER; note = uracil
  modified_base 117..118: mod_base = OTHER; note = uracil
  modified_base 126: mod_base = OTHER; note = uracil
  modified_base 128: mod_base = OTHER; note = uracil
  modified_base 135..138: mod_base = OTHER; note = uracil
  modified_base 141..142: mod_base = OTHER; note = uracil
  modified_base 145: mod_base = OTHER; note = uracil
  modified_base 147..148: mod_base = OTHER; note = uracil
  modified_base 152: mod_base = OTHER; note = uracil
  modified_base 158: mod_base = OTHER; note = uracil
  modified_base 160..161: mod_base = OTHER; note = uracil
  modified_base 164: mod_base = OTHER; note = uracil
  modified_base 169..171: mod_base = OTHER; note = uracil
  modified_base 173..176: mod_base = OTHER; note = uracil
  modified_base 179: mod_base = OTHER; note = uracil
  modified_base 185..186: mod_base = OTHER; note = uracil
  modified_base 193..195: mod_base = OTHER; note = uracil
  modified_base 205: mod_base = OTHER; note = uracil
  modified_base 211: mod_base = OTHER; note = uracil
  modified_base 215: mod_base = OTHER; note = uracil
  modified_base 217: mod_base = OTHER; note = uracil
  modified_base 221..222: mod_base = OTHER; note = uracil
  modified_base 225..227: mod_base = OTHER; note = uracil
  modified_base 230: mod_base = OTHER; note = uracil
  modified_base 233: mod_base = OTHER; note = uracil
  modified_base 240: mod_base = OTHER; note = uracil
  modified_base 244: mod_base = OTHER; note = uracil
  modified_base 247: mod_base = OTHER; note = uracil
  modified_base 250: mod_base = OTHER; note = uracil
  modified_base 252..254: mod_base = OTHER; note = uracil
  modified_base 263..264: mod_base = OTHER; note = uracil
  modified_base 266..267: mod_base = OTHER; note = uracil
  modified_base 271: mod_base = OTHER; note = uracil
  modified_base 273..275: mod_base = OTHER; note = uracil
  modified_base 277: mod_base = OTHER; note = uracil
  modified_base 279..280: mod_base = OTHER; note = uracil
  modified_base 287: mod_base = OTHER; note = uracil
  modified_base 293: mod_base = OTHER; note = uracil
  modified_base 295..297: mod_base = OTHER; note = uracil
  modified_base 36: mod_base = m5c
  modified_base 40: mod_base = m5c
  modified_base 87: mod_base = m5c
  modified_base 93: mod_base = m5c
  modified_base 102: mod_base = m5c
  modified_base 155: mod_base = m5c
  modified_base 180: mod_base = m5c
  modified_base 231: mod_base = m5c
  modified_base 256: mod_base = m5c
  variation 150: note = CpG site, residue is C if methylated or T(=U) if unmethylated
tagtgttgtagatttattaattattaggataattacggacggggaaatttagatatagatataattagtgtttttttttattttttcgtatacgtttttttcggtttttttgatattttggtgtgtattgtgtttttttgttatttttaygttgcggtttttattagatttatttttgtcggtgttaaaatgtttaaaggaaggttgagttatgttttggtttgtttagtcgtaatagttatgttgtaatttttacggaaaatttttttttatttattttagaggtttgagatattttaa

SEQ ID NO: 190 - DNA, 300 bp, synthetic construct
  source 1..300: mol_type = other DNA
  modified_base 10: mod_base = OTHER; note = uracil
  modified_base 12: mod_base = OTHER; note = uracil
  modified_base 16..17: mod_base = OTHER; note = uracil
  modified_base 19: mod_base = OTHER; note = uracil
  modified_base 43: mod_base = OTHER; note = uracil
  modified_base 55: mod_base = OTHER; note = uracil
  modified_base 58: mod_base = OTHER; note = uracil
  modified_base 63: mod_base = OTHER; note = uracil
  modified_base 72: mod_base = OTHER; note = uracil
  modified_base 77: mod_base = OTHER; note = uracil
  modified_base 81..82: mod_base = OTHER; note = uracil
  modified_base 87: mod_base = OTHER; note = uracil
  modified_base 92: mod_base = OTHER; note = uracil
  modified_base 94: mod_base = OTHER; note = uracil
  modified_base 97..98: mod_base = OTHER; note = uracil
  modified_base 101..102: mod_base = OTHER; note = uracil
  modified_base 109: mod_base = OTHER; note = uracil
  modified_base 117: mod_base = OTHER; note = uracil
  modified_base 119: mod_base = OTHER; note = uracil
  modified_base 123: mod_base = OTHER; note = uracil
  modified_base 134: mod_base = OTHER; note = uracil
  modified_base 144: mod_base = OTHER; note = uracil
  modified_base 147: mod_base = OTHER; note = uracil
  modified_base 161: mod_base = OTHER; note = uracil
  modified_base 169: mod_base = OTHER; note = uracil
  modified_base 171: mod_base = OTHER; note = uracil
  modified_base 176: mod_base = OTHER; note = uracil
  modified_base 178: mod_base = OTHER; note = uracil
  modified_base 180..181: mod_base = OTHER; note = uracil
  modified_base 189: mod_base = OTHER; note = uracil
  modified_base 197: mod_base = OTHER; note = uracil
  modified_base 231: mod_base = OTHER; note = uracil
  modified_base 233: mod_base = OTHER; note = uracil
  modified_base 243: mod_base = OTHER; note = uracil
  modified_base 249: mod_base = OTHER; note = uracil
  modified_base 257..259: mod_base = OTHER; note = uracil
  modified_base 263: mod_base = OTHER; note = uracil
  modified_base 273..274: mod_base = OTHER; note = uracil
  modified_base 290: mod_base = OTHER; note = uracil
  modified_base 293: mod_base = OTHER; note = uracil
  modified_base 296: mod_base = OTHER; note = uracil
  modified_base 298: mod_base = OTHER; note = uracil
  modified_base 44: mod_base = m5c
  modified_base 69: mod_base = m5c
  modified_base 120: mod_base = m5c
  modified_base 145: mod_base = m5c
  modified_base 198: mod_base = m5c
  modified_base 207: mod_base = m5c
  modified_base 213: mod_base = m5c
  modified_base 260: mod_base = m5c
  modified_base 264: mod_base = m5c
  variation 150: note = CpG site, residue is C if methylated or T(=U) if unmethylated
ttagggtgttttagatttttggagtgggtgaaaggaggtttttcgtgggagttgtagtatgattattgcggttgggtaggttagagtatgatttagtttttttttgggtattttggtatcggtaggggtgggtttagtaggagtcgtagygtggagatggtaggggaatatagtgtatattaggatgttagggagatcgggaggggcgtgtgcggggaggtggaggagggtattgattgtatttgtgtttggattttttcgttcgtaattattttgataattaataggtttataatattg

SEQ ID NO: 191 - DNA, 300 bp, synthetic construct
  source 1..300: mol_type = other DNA
  modified_base 13: mod_base = OTHER; note = uracil
  modified_base 16: mod_base = OTHER; note = uracil
  modified_base 29: mod_base = OTHER; note = uracil
  modified_base 31..32: mod_base = OTHER; note = uracil
  modified_base 37..38: mod_base = OTHER; note = uracil
  modified_base 49: mod_base = OTHER; note = uracil
  modified_base 51: mod_base = OTHER; note = uracil
  modified_base 63: mod_base = OTHER; note = uracil
  modified_base 65..66: mod_base = OTHER; note = uracil
  modified_base 75: mod_base = OTHER; note = uracil
  modified_base 79: mod_base = OTHER; note = uracil
  modified_base 81: mod_base = OTHER; note = uracil
  modified_base 88: mod_base = OTHER; note = uracil
  modified_base 91: mod_base = OTHER; note = uracil
  modified_base 95: mod_base = OTHER; note = uracil
  modified_base 116: mod_base = OTHER; note = uracil
  modified_base 122: mod_base = OTHER; note = uracil
  modified_base 126: mod_base = OTHER; note = uracil
  modified_base 129: mod_base = OTHER; note = uracil
  modified_base 135..137: mod_base = OTHER; note = uracil
  modified_base 143: mod_base = OTHER; note = uracil
  modified_base 148: mod_base = OTHER; note = uracil
  modified_base 152: mod_base = OTHER; note = uracil
  modified_base 154..155: mod_base = OTHER; note = uracil
  modified_base 158: mod_base = OTHER; note = uracil
  modified_base 163: mod_base = OTHER; note = uracil
  modified_base 168..169: mod_base = OTHER; note = uracil
  modified_base 171: mod_base = OTHER; note = uracil
  modified_base 173: mod_base = OTHER; note = uracil
  modified_base 182: mod_base = OTHER; note = uracil
  modified_base 189..190: mod_base = OTHER; note = uracil
  modified_base 193..194: mod_base = OTHER; note = uracil
  modified_base 197..199: mod_base = OTHER; note = uracil
  modified_base 203: mod_base = OTHER; note = uracil
  modified_base 205: mod_base = OTHER; note = uracil
  modified_base 208..209: mod_base = OTHER; note = uracil
  modified_base 215..217: mod_base = OTHER; note = uracil
  modified_base 222: mod_base = OTHER; note = uracil
  modified_base 225..227: mod_base = OTHER; note = uracil
  modified_base 231..232: mod_base = OTHER; note = uracil
  modified_base 236: mod_base = OTHER; note = uracil
  modified_base 242: mod_base = OTHER; note = uracil
  modified_base 248..249: mod_base = OTHER; note = uracil
  modified_base 253..254: mod_base = OTHER; note = uracil
  modified_base 260: mod_base = OTHER; note = uracil
  modified_base 263: mod_base = OTHER; note = uracil
  modified_base 268: mod_base = OTHER; note = uracil
  modified_base 276..277: mod_base = OTHER; note = uracil
  modified_base 279: mod_base = OTHER; note = uracil
  modified_base 281..282: mod_base = OTHER; note = uracil
  modified_base 291: mod_base = OTHER; note = uracil
  modified_base 9: mod_base = m5c
  modified_base 40: mod_base = m5c
  modified_base 54: mod_base = m5c
  modified_base 76: mod_base = m5c
  modified_base 103: mod_base = m5c
  modified_base 108: mod_base = m5c
  modified_base 114: mod_base = m5c
  modified_base 127: mod_base = m5c
  modified_base 138: mod_base = m5c
  modified_base 146: mod_base = m5c
  modified_base 165: mod_base = m5c
  modified_base 174: mod_base = m5c
  modified_base 179: mod_base = m5c
  modified_base 183: mod_base = m5c
  modified_base 186: mod_base = m5c
  modified_base 201: mod_base = m5c
  modified_base 234: mod_base = m5c
  modified_base 237: mod_base = m5c
  modified_base 243: mod_base = m5c
  modified_base 250: mod_base = m5c
  modified_base 289: mod_base = m5c
  variation 150: note = CpG site, residue is C if methylated or T(=U) if unmethylated
ggaaggagcgagtttttttttataggagttttagtttttcgttttgtttttttcgggttattttttaaagaaagtcggtttttgagttagttggtaggagagcgaggcgaatgcgttggtgttggtcgtaatggtttcggtttaacgttygttttagttggttacgtttttatcggggcggtcggcggtttgtttgtttacgttttgttaggagtttaggttagtttttgtttcgtcggggtcggagttcgtttaaaattaataagttttttgtgttttttttttggacgttgtataatt

SEQ ID NO: 192 - DNA, 300 bp, synthetic construct
  source 1..300: mol_type = other DNA
  modified_base 8: mod_base = OTHER; note = uracil
  modified_base 14..15: mod_base = OTHER; note = uracil
  modified_base 26: mod_base = OTHER; note = uracil
  modified_base 28: mod_base = OTHER; note = uracil
  modified_base 35: mod_base = OTHER; note = uracil
  modified_base 54: mod_base = OTHER; note = uracil
  modified_base 56: mod_base = OTHER; note = uracil
  modified_base 60..62: mod_base = OTHER; note = uracil
  modified_base 71: mod_base = OTHER; note = uracil
  modified_base 77: mod_base = OTHER; note = uracil
  modified_base 81..82: mod_base = OTHER; note = uracil
  modified_base 87: mod_base = OTHER; note = uracil
  modified_base 89..90: mod_base = OTHER; note = uracil
  modified_base 94: mod_base = OTHER; note = uracil
  modified_base 105: mod_base = OTHER; note = uracil
  modified_base 109: mod_base = OTHER; note = uracil
  modified_base 113: mod_base = OTHER; note = uracil
  modified_base 116: mod_base = OTHER; note = uracil
  modified_base 120: mod_base = OTHER; note = uracil
  modified_base 123..125: mod_base = OTHER; note = uracil
  modified_base 140..141: mod_base = OTHER; note = uracil
  modified_base 144: mod_base = OTHER; note = uracil
  modified_base 161: mod_base = OTHER; note = uracil
  modified_base 167..168: mod_base = OTHER; note = uracil
  modified_base 176..177: mod_base = OTHER; note = uracil
  modified_base 180: mod_base = OTHER; note = uracil
  modified_base 182..183: mod_base = OTHER; note = uracil
  modified_base 188: mod_base = OTHER; note = uracil
  modified_base 194..195: mod_base = OTHER; note = uracil
  modified_base 199: mod_base = OTHER; note = uracil
  modified_base 201: mod_base = OTHER; note = uracil
  modified_base 203..204: mod_base = OTHER; note = uracil
  modified_base 207..208: mod_base = OTHER; note = uracil
  modified_base 211: mod_base = OTHER; note = uracil
  modified_base 215: mod_base = OTHER; note = uracil
  modified_base 217: mod_base = OTHER; note = uracil
  modified_base 223: mod_base = OTHER; note = uracil
  modified_base 227: mod_base = OTHER; note = uracil
  modified_base 231: mod_base = OTHER; note = uracil
  modified_base 244..245: mod_base = OTHER; note = uracil
  modified_base 255: mod_base = OTHER; note = uracil
  modified_base 267: mod_base = OTHER; note = uracil
  modified_base 273: mod_base = OTHER; note = uracil
  modified_base 275..276: mod_base = OTHER; note = uracil
  modified_base 289: mod_base = OTHER; note = uracil
  modified_base 293: mod_base = OTHER; note = uracil
  modified_base 295..296: mod_base = OTHER; note = uracil
  modified_base 299..300: mod_base = OTHER; note = uracil
  modified_base 11: mod_base = m5c
  modified_base 50: mod_base = m5c
  modified_base 57: mod_base = m5c
  modified_base 63: mod_base = m5c
  modified_base 66: mod_base = m5c
  modified_base 99: mod_base = m5c
  modified_base 114: mod_base = m5c
  modified_base 117: mod_base = m5c
  modified_base 121: mod_base = m5c
  modified_base 126: mod_base = m5c
  modified_base 135: mod_base = m5c
  modified_base 154: mod_base = m5c
  modified_base 162: mod_base = m5c
  modified_base 173: mod_base = m5c
  modified_base 186: mod_base = m5c
  modified_base 192: mod_base = m5c
  modified_base 197: mod_base = m5c
  modified_base 224: mod_base = m5c
  modified_base 246: mod_base = m5c
  modified_base 260: mod_base = m5c
  modified_base 291: mod_base = m5c
  variation 150: note = CpG site, residue is C if methylated or T(=U) if unmethylated
aattatatagcgtttaaaggagaggtataaaagatttgttgattttggacgggtttcggtttcggcgaggtaagggttgatttgggtttttggtagagcgtgggtaggtaggtcgtcggtcgtttcggtgaggacgtgattagttggagygagcgttgaatcggggttattgcggttagtattagcgtattcgtttcgtttttttgttagttgatttaagagtcggttttttttggagaataattcgaagagaataaaacgaggaattggagtttttataaaaagaagttcgtttttttt

SEQ ID NO: 193 - DNA, 300 bp, synthetic construct
  source 1..300: mol_type = other DNA
  modified_base 1: mod_base = OTHER; note = uracil
  modified_base 21: mod_base = OTHER; note = uracil
  modified_base 23: mod_base = OTHER; note = uracil
  modified_base 25: mod_base = OTHER; note = uracil
  modified_base 29..31: mod_base = OTHER; note = uracil
  modified_base 42: mod_base = OTHER; note = uracil
  modified_base 52: mod_base = OTHER; note = uracil
  modified_base 55: mod_base = OTHER; note = uracil
  modified_base 61: mod_base = OTHER; note = uracil
  modified_base 63: mod_base = OTHER; note = uracil
  modified_base 86: mod_base = OTHER; note = uracil
  modified_base 90: mod_base = OTHER; note = uracil
  modified_base 106..107: mod_base = OTHER; note = uracil
  modified_base 114: mod_base = OTHER; note = uracil
  modified_base 117: mod_base = OTHER; note = uracil
  modified_base 148: mod_base = OTHER; note = uracil
  modified_base 154: mod_base = OTHER; note = uracil
  modified_base 158..159: mod_base = OTHER; note = uracil
  modified_base 167..169: mod_base = OTHER; note = uracil
  modified_base 177..179: mod_base = OTHER; note = uracil
  modified_base 182: mod_base = OTHER; note = uracil
  modified_base 186..189: mod_base = OTHER; note = uracil
  modified_base 192..193: mod_base = OTHER; note = uracil
  modified_base 195..196: mod_base = OTHER; note = uracil
  modified_base 201: mod_base = OTHER; note = uracil
  modified_base 204: mod_base = OTHER; note = uracil
  modified_base 221: mod_base = OTHER; note = uracil
  modified_base 225: mod_base = OTHER; note = uracil
  modified_base 229: mod_base = OTHER; note = uracil
  modified_base 231: mod_base = OTHER; note = uracil
  modified_base 234: mod_base = OTHER; note = uracil
  modified_base 236: mod_base = OTHER; note = uracil
  modified_base 238..239: mod_base = OTHER; note = uracil
  modified_base 241: mod_base = OTHER; note = uracil
  modified_base 261: mod_base = OTHER; note = uracil
  modified_base 271: mod_base = OTHER; note = uracil
  modified_base 274: mod_base = OTHER; note = uracil
  modified_base 278..280: mod_base = OTHER; note = uracil
  modified_base 282..283: mod_base = OTHER; note = uracil
  modified_base 286: mod_base = OTHER; note = uracil
  modified_base 291..294: mod_base = OTHER; note = uracil
  modified_base 296..299: mod_base = OTHER; note = uracil
  modified_base 17: mod_base = m5c
  modified_base 26: mod_base = m5c
  modified_base 32: mod_base = m5c
  modified_base 57: mod_base = m5c
  modified_base 79: mod_base = m5c
  modified_base 132: mod_base = m5c
  modified_base 138: mod_base = m5c
  modified_base 143: mod_base = m5c
  modified_base 155: mod_base = m5c
  modified_base 171: mod_base = m5c
  modified_base 183: mod_base = m5c
  modified_base 208: mod_base = m5c
  modified_base 223: mod_base = m5c
  modified_base 245: mod_base = m5c
  modified_base 259: mod_base = m5c
  modified_base 262: mod_base = m5c
  modified_base 272: mod_base = m5c
  modified_base 287: mod_base = m5c
  variation 151: note = CpG site, residue is C if methylated or T(=U) if unmethylated
ttggttgtggaaggagcgagtttttcgttttcgggagtatgtaagtttgggttgtacgattatttggaagggattgggcggagttttgttatttggagaaagggttttgggagttttaggtttgtgtagggcgaggacggggcggttttgygttcggttaggttggttttcgaggatttagtcgtttttaattttttaaattgttgtcggatgtagaagattcgtatttattgttttttatagtcggtgaagggagaacgtcgaaaagggtcgtatttttttttgtcggttttttttttt

SEQ ID NO: 194 - DNA, 300 bp, synthetic construct
  source 1..300: mol_type = other DNA
  modified_base 12: mod_base = OTHER; note = uracil
  modified_base 16: mod_base = OTHER; note = uracil
  modified_base 31..33: mod_base = OTHER; note = uracil
  modified_base 45: mod_base = OTHER; note = uracil
  modified_base 47..49: mod_base = OTHER; note = uracil
  modified_base 52: mod_base = OTHER; note = uracil
  modified_base 54: mod_base = OTHER; note = uracil
  modified_base 58: mod_base = OTHER; note = uracil
  modified_base 68: mod_base = OTHER; note = uracil
  modified_base 82: mod_base = OTHER; note = uracil
  modified_base 85: mod_base = OTHER; note = uracil
  modified_base 88: mod_base = OTHER; note = uracil
  modified_base 91: mod_base = OTHER; note = uracil
  modified_base 95: mod_base = OTHER; note = uracil
  modified_base 98: mod_base = OTHER; note = uracil
  modified_base 120: mod_base = OTHER; note = uracil
  modified_base 126..127: mod_base = OTHER; note = uracil
  modified_base 135..136: mod_base = OTHER; note = uracil
  modified_base 139..140: mod_base = OTHER; note = uracil
  modified_base 144: mod_base = OTHER; note = uracil
  modified_base 151: mod_base = OTHER; note = uracil
  modified_base 156: mod_base = OTHER; note = uracil
  modified_base 159..161: mod_base = OTHER; note = uracil
  modified_base 165..166: mod_base = OTHER; note = uracil
  modified_base 170..172: mod_base = OTHER; note = uracil
  modified_base 175: mod_base = OTHER; note = uracil
  modified_base 177: mod_base = OTHER; note = uracil
  modified_base 181..182: mod_base = OTHER; note = uracil
  modified_base 188: mod_base = OTHER; note = uracil
  modified_base 190..192: mod_base = OTHER; note = uracil
  modified_base 197..199: mod_base = OTHER; note = uracil
  modified_base 203: mod_base = OTHER; note = uracil
  modified_base 205..206: mod_base = OTHER; note = uracil
  modified_base 213: mod_base = OTHER; note = uracil
  modified_base 218: mod_base = OTHER; note = uracil
  modified_base 220: mod_base = OTHER; note = uracil
  modified_base 223..225: mod_base = OTHER; note = uracil
  modified_base 229..231: mod_base = OTHER; note = uracil
  modified_base 234..235: mod_base = OTHER; note = uracil
  modified_base 247: mod_base = OTHER; note = uracil
  modified_base 250..252: mod_base = OTHER; note = uracil
  modified_base 256: mod_base = OTHER; note = uracil
  modified_base 260: mod_base = OTHER; note = uracil
  modified_base 264: mod_base = OTHER; note = uracil
  modified_base 266..267: mod_base = OTHER; note = uracil
  modified_base 281: mod_base = OTHER; note = uracil
  modified_base 285: mod_base = OTHER; note = uracil
  modified_base 287..288: mod_base = OTHER; note = uracil
  modified_base 291..292: mod_base = OTHER; note = uracil
  modified_base 294: mod_base = OTHER; note = uracil
  modified_base 297..298: mod_base = OTHER; note = uracil
  modified_base 13: mod_base = m5c
  modified_base 28: mod_base = m5c
  modified_base 38: mod_base = m5c
  modified_base 41: mod_base = m5c
  modified_base 55: mod_base = m5c
  modified_base 77: mod_base = m5c
  modified_base 92: mod_base = m5c
  modified_base 117: mod_base = m5c
  modified_base 129: mod_base = m5c
  modified_base 145: mod_base = m5c
  modified_base 157: mod_base = m5c
  modified_base 162: mod_base = m5c
  modified_base 168: mod_base = m5c
  modified_base 221: mod_base = m5c
  modified_base 243: mod_base = m5c
  modified_base 268: mod_base = m5c
  modified_base 274: mod_base = m5c
  modified_base 283: mod_base = m5c
  variation 149: note = CpG site, residue is C if methylated or T(=U) if unmethylated
aggggaggggatcggtaggagggaatgcggtttttttcggcgttttttttttatcgattgtggagagtagtgaatgcgagttttttatattcgatagtagtttaggaggttggggacggttgggttttcgagggttaatttggtcggaygtagaatcgtttcgttttcgttttatataaatttgaagtttttaggattttttttttaaatgatagaatttcgtttaattttttttaagtgatcgtgtagtttaaatttgtatattttcggggacggagagttcgttttttttataattag

SEQ ID NO: 195 - DNA, 300 bp, synthetic construct
  source 1..300: mol_type = other DNA
  modified_base 7: mod_base = OTHER; note = uracil
  modified_base 11: mod_base = OTHER; note = uracil
  modified_base 14..16: mod_base = OTHER; note = uracil
  modified_base 26..27: mod_base = OTHER; note = uracil
  modified_base 30..31: mod_base = OTHER; note = uracil
  modified_base 33..34: mod_base = OTHER; note = uracil
  modified_base 36..37: mod_base = OTHER; note = uracil
  modified_base 40..41: mod_base = OTHER; note = uracil
  modified_base 43: mod_base = OTHER; note = uracil
  modified_base 46..47: mod_base = OTHER; note = uracil
  modified_base 49: mod_base = OTHER; note = uracil
  modified_base 54..56: mod_base = OTHER; note = uracil
  modified_base 58..60: mod_base = OTHER; note = uracil
  modified_base 62: mod_base = OTHER; note = uracil
  modified_base 65..68: mod_base = OTHER; note = uracil
  modified_base 70: mod_base = OTHER; note = uracil
  modified_base 74: mod_base = OTHER; note = uracil
  modified_base 79: mod_base = OTHER; note = uracil
  modified_base 82..85: mod_base = OTHER; note = uracil
  modified_base 90: mod_base = OTHER; note = uracil
  modified_base 95..96: mod_base = OTHER; note = uracil
  modified_base 106..107: mod_base = OTHER; note = uracil
  modified_base 115: mod_base = OTHER; note = uracil
  modified_base 119: mod_base = OTHER; note = uracil
  modified_base 121: mod_base = OTHER; note = uracil
  modified_base 123: mod_base = OTHER; note = uracil
  modified_base 135: mod_base = OTHER; note = uracil
  modified_base 137: mod_base = OTHER; note = uracil
  modified_base 143: mod_base = OTHER; note = uracil
  modified_base 145: mod_base = OTHER; note = uracil
  modified_base 150: mod_base = OTHER; note = uracil
  modified_base 163: mod_base = OTHER; note = uracil
  modified_base 166: mod_base = OTHER; note = uracil
  modified_base 171: mod_base = OTHER; note = uracil
  modified_base 173: mod_base = OTHER; note = uracil
  modified_base 176: mod_base = OTHER; note = uracil
  modified_base 180: mod_base = OTHER; note = uracil
  modified_base 183..184: mod_base = OTHER; note = uracil
  modified_base 189: mod_base = OTHER; note = uracil
  modified_base 191: mod_base = OTHER; note = uracil
  modified_base 193..194: mod_base = OTHER; note = uracil
  modified_base 199: mod_base = OTHER; note = uracil
  modified_base 213: mod_base = OTHER; note = uracil
  modified_base 218: mod_base = OTHER; note = uracil
  modified_base 223: mod_base = OTHER; note = uracil
  modified_base 225..228: mod_base = OTHER; note = uracil
  modified_base 231..232: mod_base = OTHER; note = uracil
  modified_base 245: mod_base = OTHER; note = uracil
  modified_base 247: mod_base = OTHER; note = uracil
  modified_base 250..251: mod_base = OTHER; note = uracil
  modified_base 264: mod_base = OTHER; note = uracil
  modified_base 268: mod_base = OTHER; note = uracil
  modified_base 274: mod_base = OTHER; note = uracil
  modified_base 286: mod_base = OTHER; note = uracil
  modified_base 300: mod_base = OTHER; note = uracil
  modified_base 108: mod_base = m5c
  modified_base 196: mod_base = m5c
  modified_base 208: mod_base = m5c
  modified_base 220: mod_base = m5c
  modified_base 275: mod_base = m5c
  modified_base 284: mod_base = m5c
  variation 151: note = CpG site, residue is C if methylated or T(=U) if unmethylated
gggtgttaggttatttttgaagggatttattttttttagttattgttattggatttttttttagtttttttagtaaagtagttttaatgtatgttttgagattgtttcggaaaattgttatttagaggggaagatttttgggtatagagtygttatttataatagtaagatattgtaggttgtttaaatattttacgatagagatgacggagtaatttacggtatttttgttaagagagtattatatagttattaaaaatgattaagtagagatcggtagtgacgttgagtaatgttttt

SEQ ID NO: 196 - DNA, 300 bp, synthetic construct
  source 1..300: mol_type = other DNA
  modified_base 6: mod_base = OTHER; note = uracil
  modified_base 11: mod_base = OTHER; note = uracil
  modified_base 13: mod_base = OTHER; note = uracil
  modified_base 19: mod_base = OTHER; note = uracil
  modified_base 21: mod_base = OTHER; note = uracil
  modified_base 24: mod_base = OTHER; note = uracil
  modified_base 29: mod_base = OTHER; note = uracil
  modified_base 31: mod_base = OTHER; note = uracil
  modified_base 34: mod_base = OTHER; note = uracil
  modified_base 40: mod_base = OTHER; note = uracil
  modified_base 52: mod_base = OTHER; note = uracil
  modified_base 62: mod_base = OTHER; note = uracil
  modified_base 64: mod_base = OTHER; note = uracil
  modified_base 66: mod_base = OTHER; note = uracil
  modified_base 71: mod_base = OTHER; note = uracil
  modified_base 79: mod_base = OTHER; note = uracil
  modified_base 89: mod_base = OTHER; note = uracil
  modified_base 91: mod_base = OTHER; note = uracil
  modified_base 95: mod_base = OTHER; note = uracil
  modified_base 98: mod_base = OTHER; note = uracil
  modified_base 100: mod_base = OTHER; note = uracil
  modified_base 119: mod_base = OTHER; note = uracil
  modified_base 122..123: mod_base = OTHER; note = uracil
  modified_base 126: mod_base = OTHER; note = uracil
  modified_base 132: mod_base = OTHER; note = uracil
  modified_base 136: mod_base = OTHER; note = uracil
  modified_base 152: mod_base = OTHER; note = uracil
  modified_base 154: mod_base = OTHER; note = uracil
  modified_base 159..161: mod_base = OTHER; note = uracil
  modified_base 168: mod_base = OTHER; note = uracil
  modified_base 171..174: mod_base = OTHER; note = uracil
  modified_base 176: mod_base = OTHER; note = uracil
  modified_base 184: mod_base = OTHER; note = uracil
  modified_base 191: mod_base = OTHER; note = uracil
  modified_base 197: mod_base = OTHER; note = uracil
  modified_base 201: mod_base = OTHER; note = uracil
  modified_base 203: mod_base = OTHER; note = uracil
  modified_base 208: mod_base = OTHER; note = uracil
  modified_base 212: mod_base = OTHER; note = uracil
  modified_base 220: mod_base = OTHER; note = uracil
  modified_base 223: mod_base = OTHER; note = uracil
  modified_base 228: mod_base = OTHER; note = uracil
  modified_base 237: mod_base = OTHER; note = uracil
  modified_base 249..250: mod_base = OTHER; note = uracil
  modified_base 256: mod_base = OTHER; note = uracil
  modified_base 262: mod_base = OTHER; note = uracil
  modified_base 277..279: mod_base = OTHER; note = uracil
  modified_base 282: mod_base = OTHER; note = uracil
  modified_base 291..292: mod_base = OTHER; note = uracil
  modified_base 296: mod_base = OTHER; note = uracil
  modified_base 298..300: mod_base = OTHER; note = uracil
  modified_base 16: mod_base = m5c
  modified_base 25: mod_base = m5c
  modified_base 80: mod_base = m5c
  modified_base 92: mod_base = m5c
  modified_base 104: mod_base = m5c
  modified_base 192: mod_base = m5c
  variation 149: note = CpG site, residue is C if methylated or T(=U) if unmethylated
gaaaatattatttagcgttattatcggtttttgtttgattatttttaatggttgtgtaatatttttttggtaggggtgtcgtgaattgtttcgttatttttgtcgtggagtgtttaggtagtttgtagtgttttgttgttataaataayggttttgtgtttaagagtttttttttttgagtgatagtttttcgggataattttaggatatgtattggggttgttttgttagaggggttgagggagggtttagtggtagtggttggaggaggtaggtttttttaagggtagtttgatattt

SEQ ID NO: 197 - DNA, 300 bp, synthetic construct
  source 1..300: mol_type = other DNA
  modified_base 2..4: mod_base = OTHER; note = uracil
  modified_base 6: mod_base = OTHER; note = uracil
  modified_base 16..21: mod_base = OTHER; note = uracil
  modified_base 25..26: mod_base = OTHER; note = uracil
  modified_base 28..29: mod_base = OTHER; note = uracil
  modified_base 31: mod_base = OTHER; note = uracil
  modified_base 34..35: mod_base = OTHER; note = uracil
  modified_base 37: mod_base = OTHER; note = uracil
  modified_base 39: mod_base = OTHER; note = uracil
  modified_base 43: mod_base = OTHER; note = uracil
  modified_base 45: mod_base = OTHER; note = uracil
  modified_base 47..49: mod_base = OTHER; note = uracil
  modified_base 54: mod_base = OTHER; note = uracil
  modified_base 56..57: mod_base = OTHER; note = uracil
  modified_base 59..60: mod_base = OTHER; note = uracil
  modified_base 62..63: mod_base = OTHER; note = uracil
  modified_base 65..66: mod_base = OTHER; note = uracil
  modified_base 68..69: mod_base = OTHER; note = uracil
  modified_base 76..78: mod_base = OTHER; note = uracil
  modified_base 80..82: mod_base = OTHER; note = uracil
  modified_base 85..89: mod_base = OTHER; note = uracil
  modified_base 93: mod_base = OTHER; note = uracil
  modified_base 95: mod_base = OTHER; note = uracil
  modified_base 103: mod_base = OTHER; note = uracil
  modified_base 105: mod_base = OTHER; note = uracil
  modified_base 107: mod_base = OTHER; note = uracil
  modified_base 109..111: mod_base = OTHER; note = uracil
  modified_base 116: mod_base = OTHER; note = uracil
  modified_base 118..119: mod_base = OTHER; note = uracil
  modified_base 122: mod_base = OTHER; note = uracil
  modified_base 125..126: mod_base = OTHER; note = uracil
  modified_base 131..134: mod_base = OTHER; note = uracil
  modified_base 136..137: mod_base = OTHER; note = uracil
  modified_base 139: mod_base = OTHER; note = uracil
  modified_base 144..146: mod_base = OTHER; note = uracil
  modified_base 148: mod_base = OTHER; note = uracil
  modified_base 154..155: mod_base = OTHER; note = uracil
  modified_base 161: mod_base = OTHER; note = uracil
  modified_base 172: mod_base = OTHER; note = uracil
  modified_base 175: mod_base = OTHER; note = uracil
  modified_base 188: mod_base = OTHER; note = uracil
  modified_base 190..193: mod_base = OTHER; note = uracil
  modified_base 198: mod_base = OTHER; note = uracil
  modified_base 203: mod_base = OTHER; note = uracil
  modified_base 207..210: mod_base = OTHER; note = uracil
  modified_base 212: mod_base = OTHER; note = uracil
  modified_base 215: mod_base = OTHER; note = uracil
  modified_base 218: mod_base = OTHER; note = uracil
  modified_base 221..223: mod_base = OTHER; note = uracil
  modified_base 226..230: mod_base = OTHER; note = uracil
  modified_base 232..234: mod_base = OTHER; note = uracil
  modified_base 236: mod_base = OTHER; note = uracil
  modified_base 238: mod_base = OTHER; note = uracil
  modified_base 240: mod_base = OTHER; note = uracil
  modified_base 242: mod_base = OTHER; note = uracil
  modified_base 247: mod_base = OTHER; note = uracil
  modified_base 254: mod_base = OTHER; note = uracil
  modified_base 260..261: mod_base = OTHER; note = uracil
  modified_base 264..267: mod_base = OTHER; note = uracil
  modified_base 274: mod_base = OTHER; note = uracil
  modified_base 278: mod_base = OTHER; note = uracil
  modified_base 286: mod_base = OTHER; note = uracil
  modified_base 7: mod_base = m5c
  modified_base 9: mod_base = m5c
  modified_base 140: mod_base = m5c
  modified_base 204: mod_base = m5c
  modified_base 255: mod_base = m5c
  variation 149: note = CpG site, residue is C if methylated or T(=U) if unmethylated
gtttatcgcggagggtttttttattttttttatttttattggtttatttagggtattattattttttttaggaaattttttttgttttttatttttgggtgttttatattttgggtatttatagttagaattttattttcgggtttttygtttttagtggttgagtaggagttttagttttaggagatttttttgagtagaatcgatttttttttatttttttaatttttatttatatatttaggattgggtatcggggtttgttttaatttgtaggtttagagttaggggttagggtgg

SEQ ID NO: 198 - DNA, 300 bp, synthetic construct
  source 1..300: mol_type = other DNA
  modified_base 1: mod_base = OTHER; note = uracil
  modified_base 3..5: mod_base = OTHER; note = uracil
  modified_base 9..12: mod_base = OTHER; note = uracil
  modified_base 16: mod_base = OTHER; note = uracil
  modified_base 18: mod_base = OTHER; note = uracil
  modified_base 23..24: mod_base = OTHER; note = uracil
  modified_base 27: mod_base = OTHER; note = uracil
  modified_base 37: mod_base = OTHER; note = uracil
  modified_base 41..43: mod_base = OTHER; note = uracil
  modified_base 49..51: mod_base = OTHER; note = uracil
  modified_base 55..56: mod_base = OTHER; note = uracil
  modified_base 100: mod_base = OTHER; note = uracil
  modified_base 103: mod_base = OTHER; note = uracil
  modified_base 105: mod_base = OTHER; note = uracil
  modified_base 114: mod_base = OTHER; note = uracil
  modified_base 116..117: mod_base = OTHER; note = uracil
  modified_base 123: mod_base = OTHER; note = uracil
  modified_base 129: mod_base = OTHER; note = uracil
  modified_base 131..132: mod_base = OTHER; note = uracil
  modified_base 135: mod_base = OTHER; note = uracil
  modified_base 137: mod_base = OTHER; note = uracil
  modified_base 140..141: mod_base = OTHER; note = uracil
  modified_base 143: mod_base = OTHER; note = uracil
  modified_base 157..158: mod_base = OTHER; note = uracil
  modified_base 172: mod_base = OTHER; note = uracil
  modified_base 176: mod_base = OTHER; note = uracil
  modified_base 185..187: mod_base = OTHER; note = uracil
  modified_base 199: mod_base = OTHER; note = uracil
  modified_base 201..203: mod_base = OTHER; note = uracil
  modified_base 216: mod_base = OTHER; note = uracil
  modified_base 228..229: mod_base = OTHER; note = uracil
  modified_base 247..249: mod_base = OTHER; note = uracil
  modified_base 258..259: mod_base = OTHER; note = uracil
  modified_base 285..287: mod_base = OTHER; note = uracil
  modified_base 289: mod_base = OTHER; note = uracil
  modified_base 299: mod_base = OTHER; note = uracil
  modified_base 44: mod_base = m5c
  modified_base 95: mod_base = m5c
  modified_base 159: mod_base = m5c
  modified_base 290: mod_base = m5c
  modified_base 292: mod_base = m5c
  variation 150: note = CpG site, residue is C if methylated or T(=U) if unmethylated
tattttaatttttgattttaagtttgtaaattggggtaggtttcggtatttagttttgagtgtgtgggtgggggttgggaagatgaagaggggtcggttttgtttaggggagttttttaaaattgaagtttttatttagttattggaaayggagggttcggaggtggggttttggttgtaggtgtttagggtgtgagatatttagagatagggggtagggagggttttttggaggaggtggtggtgttttgggtgagttagtgaggatgaggaggataggggggtttttcgcggtgggta

SEQ ID NO: 199 - DNA, 300 bp, synthetic construct
  source 1..300: mol_type = other DNA
  modified_base 1: mod_base = OTHER; note = uracil
  modified_base 16: mod_base = OTHER; note = uracil
  modified_base 23: mod_base = OTHER; note = uracil
  modified_base 26: mod_base = OTHER; note = uracil
  modified_base 28: mod_base = OTHER; note = uracil
  modified_base 31: mod_base = OTHER; note = uracil
  modified_base 48: mod_base = OTHER; note = uracil
  modified_base 55: mod_base = OTHER; note = uracil
  modified_base 62: mod_base = OTHER; note = uracil
  modified_base 73: mod_base = OTHER; note = uracil
  modified_base 78: mod_base = OTHER; note = uracil
  modified_base 80..81: mod_base = OTHER; note = uracil
  modified_base 84: mod_base = OTHER; note = uracil
  modified_base 86: mod_base = OTHER; note = uracil
  modified_base 90..91: mod_base = OTHER; note = uracil
  modified_base 95..96: mod_base = OTHER; note = uracil
  modified_base 98: mod_base = OTHER; note = uracil
  modified_base 102: mod_base = OTHER; note = uracil
  modified_base 107: mod_base = OTHER; note = uracil
  modified_base 109: mod_base = OTHER; note = uracil
  modified_base 112: mod_base = OTHER; note = uracil
  modified_base 116: mod_base = OTHER; note = uracil
  modified_base 120: mod_base = OTHER; note = uracil
  modified_base 125..126: mod_base = OTHER; note = uracil
  modified_base 134: mod_base = OTHER; note = uracil
  modified_base 136: mod_base = OTHER; note = uracil
  modified_base 140: mod_base = OTHER; note = uracil
  modified_base 145..146: mod_base = OTHER; note = uracil
  modified_base 161: mod_base = OTHER; note = uracil
  modified_base 163: mod_base = OTHER; note = uracil
  modified_base 169: mod_base = OTHER; note = uracil
  modified_base 180: mod_base = OTHER; note = uracil
  modified_base 182: mod_base = OTHER; note = uracil
  modified_base 191: mod_base = OTHER; note = uracil
  modified_base 201..203: mod_base = OTHER; note = uracil
  modified_base 206: mod_base = OTHER; note = uracil
  modified_base 212..213: mod_base = OTHER; note = uracil
  modified_base 215..216: mod_base = OTHER; note = uracil
  modified_base 218..219: mod_base = OTHER; note = uracil
  modified_base 222: mod_base = OTHER; note = uracil
  modified_base 224: mod_base = OTHER; note = uracil
  modified_base 227..228: mod_base = OTHER; note = uracil
  modified_base 234..238: mod_base = OTHER; note = uracil
  modified_base 241..242: mod_base = OTHER; note = uracil
  modified_base 246: mod_base = OTHER; note = uracil
  modified_base 249: mod_base = OTHER; note = uracil
  modified_base 252: mod_base = OTHER; note = uracil
  modified_base 255..256: mod_base = OTHER; note = uracil
  modified_base 260: mod_base = OTHER; note = uracil
  modified_base 262..264: mod_base = OTHER; note = uracil
  modified_base 267: mod_base = OTHER; note = uracil
  modified_base 274: mod_base = OTHER; note = uracil
  modified_base 285: mod_base = OTHER; note = uracil
  modified_base 287..288: mod_base = OTHER; note = uracil
  modified_base 29: mod_base = m5c
  modified_base 50: mod_base = m5c
  modified_base 58: mod_base = m5c
  modified_base 60: mod_base = m5c
  modified_base 88: mod_base = m5c
  modified_base 93: mod_base = m5c
  modified_base 127: mod_base = m5c
  modified_base 137: mod_base = m5c
  modified_base 153: mod_base = m5c
  modified_base 156: mod_base = m5c
  modified_base 164: mod_base = m5c
  modified_base 174: mod_base = m5c
  modified_base 177: mod_base = m5c
  modified_base 183: mod_base = m5c
  modified_base 194: mod_base = m5c
  modified_base 204: mod_base = m5c
  modified_base 209: mod_base = m5c
  modified_base 225: mod_base = m5c
  modified_base 229: mod_base = m5c
  modified_base 231: mod_base = m5c
  modified_base 244: mod_base = m5c
  modified_base 247: mod_base = m5c
  modified_base 250: mod_base = m5c
  modified_base 253: mod_base = m5c
  modified_base 257: mod_base = m5c
  modified_base 269: mod_base = m5c
  modified_base 275: mod_base = m5c
  modified_base 278: mod_base = m5c
  modified_base 283: mod_base = m5c
  modified_base 289: mod_base = m5c
  modified_base 294: mod_base = m5c
  modified_base 298: mod_base = m5c
  variation 150: note = CpG site, residue is C if methylated or T(=U) if unmethylated
tttaaatgagaagaatatgtttttatatcgtatttgtgaaagtttggttcggagttacgcgttgattaatattagattttttttattcgtttcgttataattttgttatatttggttgataaatttcgaggaatttcggtaaagttaggyggcggcggggtttcgggtttgggcggcggtttcggaggagtagcgggagatttcgtagcggtttttttttttttcgttcgcggtttttagtttcgtcgtcgtcgttcggtttttagtacggaatcgacggggcgttttcgagacgggcga

SEQ ID NO: 200 - DNA, 300 bp, synthetic construct
  source 1..300: mol_type = other DNA
  modified_base 4..5: mod_base = OTHER; note = uracil
  modified_base 9: mod_base = OTHER; note = uracil
  modified_base 19..21: mod_base = OTHER; note = uracil
  modified_base 30: mod_base = OTHER; note = uracil
  modified_base 35: mod_base = OTHER; note = uracil
  modified_base 42: mod_base = OTHER; note = uracil
  modified_base 61: mod_base = OTHER; note = uracil
  modified_base 68: mod_base = OTHER; note = uracil
  modified_base 90: mod_base = OTHER; note = uracil
  modified_base 93: mod_base = OTHER; note = uracil
  modified_base 102: mod_base = OTHER; note = uracil
  modified_base 104..105: mod_base = OTHER; note = uracil
  modified_base 108: mod_base = OTHER; note = uracil
  modified_base 111: mod_base = OTHER; note = uracil
  modified_base 113..114: mod_base = OTHER; note = uracil
  modified_base 116: mod_base = OTHER; note = uracil
  modified_base 122: mod_base = OTHER; note = uracil
  modified_base 125: mod_base = OTHER; note = uracil
  modified_base 128..130: mod_base = OTHER; note = uracil
  modified_base 134..135: mod_base = OTHER; note = uracil
  modified_base 141..143: mod_base = OTHER; note = uracil
  modified_base 146: mod_base = OTHER; note = uracil
  modified_base 149: mod_base = OTHER; note = uracil
  modified_base 152..153: mod_base = OTHER; note = uracil
  modified_base 157: mod_base = OTHER; note = uracil
  modified_base 162: mod_base = OTHER; note = uracil
  modified_base 170..171: mod_base = OTHER; note = uracil
  modified_base 183: mod_base = OTHER; note = uracil
  modified_base 186..187: mod_base = OTHER; note = uracil
  modified_base 196: mod_base = OTHER; note = uracil
  modified_base 226: mod_base = OTHER; note = uracil
  modified_base 237: mod_base = OTHER; note = uracil
  modified_base 247: mod_base = OTHER; note = uracil
  modified_base 249: mod_base = OTHER; note = uracil
  modified_base 254..255: mod_base = OTHER; note = uracil
  modified_base 259: mod_base = OTHER; note = uracil
  modified_base 263: mod_base = OTHER; note = uracil
  modified_base 265: mod_base = OTHER; note = uracil
  modified_base 282: mod_base = OTHER; note = uracil
  modified_base 288: mod_base = OTHER; note = uracil
  modified_base 291: mod_base = OTHER; note = uracil
  modified_base 293: mod_base = OTHER; note = uracil
  modified_base 2: mod_base = m5c
  modified_base 6: mod_base = m5c
  modified_base 11: mod_base = m5c
  modified_base 17: mod_base = m5c
  modified_base 22: mod_base = m5c
  modified_base 25: mod_base = m5c
  modified_base 31: mod_base = m5c
  modified_base 43: mod_base = m5c
  modified_base 47: mod_base = m5c
  modified_base 50: mod_base = m5c
  modified_base 53: mod_base = m5c
  modified_base 56: mod_base = m5c
  modified_base 69: mod_base = m5c
  modified_base 71: mod_base = m5c
  modified_base 75: mod_base = m5c
  modified_base 91: mod_base = m5c
  modified_base 96: mod_base = m5c
  modified_base 106: mod_base = m5c
  modified_base 117: mod_base = m5c
  modified_base 123: mod_base = m5c
  modified_base 126: mod_base = m5c
  modified_base 136: mod_base = m5c
  modified_base 144: mod_base = m5c
  modified_base 147: mod_base = m5c
  modified_base 163: mod_base = m5c
  modified_base 173: mod_base = m5c
  modified_base 207: mod_base = m5c
  modified_base 212: mod_base = m5c
  modified_base 240: mod_base = m5c
  modified_base 242: mod_base = m5c
  modified_base 250: mod_base = m5c
  modified_base 271: mod_base = m5c
  variation 150: note = CpG site, residue is C if methylated or T(=U) if unmethylated
tcgttcgtttcgggagcgtttcgtcggtttcgtgttgggagtcgggcggcggcggcgaggttgggggtcgcgggcggagaaggaggaggtcgttgcggggtttttcgttgttttttcggagtcgtcgtttagattcggagtttcgtcgtygtttggttttgtcggagtttttcgggatttgttagttagatgtgataagattgtggcgaggcgagtgaaggagatttgatattaattagcgcgtagtttcgagttaaatttttataaatgcggtgtagaaatatgttttttttatttaag

SEQ ID NO: 201 - DNA, 300 bp, synthetic construct
  source 1..300: mol_type = other DNA
  modified_base 10: mod_base = OTHER; note = uracil
  modified_base 21: mod_base = OTHER; note = uracil
  modified_base 28..29: mod_base = OTHER; note = uracil
  modified_base 36: mod_base = OTHER; note = uracil
  modified_base 38..40: mod_base = OTHER; note = uracil
  modified_base 43..44: mod_base = OTHER; note = uracil
  modified_base 49..50: mod_base = OTHER; note = uracil
  modified_base 52..53: mod_base = OTHER; note = uracil
  modified_base 59: mod_base = OTHER; note = uracil
  modified_base 61..63: mod_base = OTHER; note = uracil
  modified_base 71: mod_base = OTHER; note = uracil
  modified_base 82..83: mod_base = OTHER; note = uracil
  modified_base 101..104: mod_base = OTHER; note = uracil
  modified_base 106: mod_base = OTHER; note = uracil
  modified_base 111: mod_base = OTHER; note = uracil
  modified_base 116..118: mod_base = OTHER; note = uracil
  modified_base 121: mod_base = OTHER; note = uracil
  modified_base 123: mod_base = OTHER; note = uracil
  modified_base 125: mod_base = OTHER; note = uracil
  modified_base 128..131: mod_base = OTHER; note = uracil
  modified_base 133: mod_base = OTHER; note = uracil
  modified_base 141: mod_base = OTHER; note = uracil
  modified_base 160: mod_base = OTHER; note = uracil
  modified_base 166..167: mod_base = OTHER; note = uracil
  modified_base 173..174: mod_base = OTHER; note = uracil
  modified_base 176: mod_base = OTHER; note = uracil
  modified_base 183..184: mod_base = OTHER; note = uracil
  modified_base 190: mod_base = OTHER; note = uracil
  modified_base 198..199: mod_base = OTHER; note = uracil
  modified_base 207: mod_base = OTHER; note = uracil
  modified_base 210: mod_base = OTHER; note = uracil
  modified_base 214: mod_base = OTHER; note = uracil
  modified_base 222: mod_base = OTHER; note = uracil
  modified_base 224: mod_base = OTHER; note = uracil
  modified_base 228: mod_base = OTHER; note = uracil
  modified_base 233: mod_base = OTHER; note = uracil
  modified_base 239..240: mod_base = OTHER; note = uracil
  modified_base 247: mod_base = OTHER; note = uracil
  modified_base 252..254: mod_base = OTHER; note = uracil
  modified_base 270: mod_base = OTHER; note = uracil
  modified_base 281..282: mod_base = OTHER; note = uracil
  modified_base 288: mod_base = OTHER; note = uracil
  modified_base 290..291: mod_base = OTHER; note = uracil
  modified_base 293: mod_base = OTHER; note = uracil
  modified_base 296..297: mod_base = OTHER; note = uracil
  modified_base 299..300: mod_base = OTHER; note = uracil
  modified_base 142: mod_base = m5c
  modified_base 177: mod_base = m5c
  modified_base 250: mod_base = m5c
  modified_base 261: mod_base = m5c
  modified_base 285: mod_base = m5c
  variation 151: note = CpG site, residue is C if methylated or T(=U) if unmethylated
gtggtaggtttgtgtggagatttgaattttgtttttttttagttttttttattaaggatatttaggagagtaaggatatggttagaggagaggtggtgttttttttttgattgggttttgtttttagttttataggtgattcggaagattygggtggagtagttttttgatgttttcggtagtttgaagttgtggtgttagttttttaatatttttagtgatttagttttgatatgggttaaggattagcgtttagtgggcgaggtgggtaggaggtaagttaacgatattattgttatt

SEQ ID NO: 202 - DNA, 300 bp, synthetic construct
  source 1..300: mol_type = other DNA
  modified_base 6: mod_base = OTHER; note = uracil
  modified_base 21: mod_base = OTHER; note = uracil
  modified_base 25..26: mod_base = OTHER; note = uracil
  modified_base 28..29: mod_base = OTHER; note = uracil
  modified_base 32..34: mod_base = OTHER; note = uracil
  modified_base 36..37: mod_base = OTHER; note = uracil
  modified_base 41..43: mod_base = OTHER; note = uracil
  modified_base 45: mod_base = OTHER; note = uracil
  modified_base 52: mod_base = OTHER; note = uracil
  modified_base 57..58: mod_base = OTHER; note = uracil
  modified_base 63..65: mod_base = OTHER; note = uracil
  modified_base 70: mod_base = OTHER; note = uracil
  modified_base 75: mod_base = OTHER; note = uracil
  modified_base 81: mod_base = OTHER; note = uracil
  modified_base 83: mod_base = OTHER; note = uracil
  modified_base 100: mod_base = OTHER; note = uracil
  modified_base 104: mod_base = OTHER; note = uracil
  modified_base 106..107: mod_base = OTHER; note = uracil
  modified_base 109: mod_base = OTHER; note = uracil
  modified_base 112: mod_base = OTHER; note = uracil
  modified_base 115: mod_base = OTHER; note = uracil
  modified_base 119: mod_base = OTHER; note = uracil
  modified_base 122: mod_base = OTHER; note = uracil
  modified_base 129: mod_base = OTHER; note = uracil
  modified_base 132: mod_base = OTHER; note = uracil
  modified_base 139: mod_base = OTHER; note = uracil
  modified_base 142: mod_base = OTHER; note = uracil
  modified_base 144..145: mod_base = OTHER; note = uracil
  modified_base 147..148: mod_base = OTHER; note = uracil
  modified_base 154: mod_base = OTHER; note = uracil
  modified_base 157: mod_base = OTHER; note = uracil
  modified_base 163: mod_base = OTHER; note = uracil
  modified_base 165..166: mod_base = OTHER; note = uracil
  modified_base 174: mod_base = OTHER; note = uracil
  modified_base 181: mod_base = OTHER; note = uracil
  modified_base 186..188: mod_base = OTHER; note = uracil
  modified_base 192: mod_base = OTHER; note = uracil
  modified_base 203: mod_base = OTHER; note = uracil
  modified_base 205..206: mod_base = OTHER; note = uracil
  modified_base 208..209: mod_base = OTHER; note = uracil
  modified_base 211: mod_base = OTHER; note = uracil
  modified_base 213..214: mod_base = OTHER; note = uracil
  modified_base 216: mod_base = OTHER; note = uracil
  modified_base 220..221: mod_base = OTHER; note = uracil
  modified_base 226..227: mod_base = OTHER; note = uracil
  modified_base 231: mod_base = OTHER; note = uracil
  modified_base 233: mod_base = OTHER; note = uracil
  modified_base 235..236: mod_base = OTHER; note = uracil
  modified_base 244..245: mod_base = OTHER; note = uracil
  modified_base 259: mod_base = OTHER; note = uracil
  modified_base 270: mod_base = OTHER; note = uracil
  modified_base 277: mod_base = OTHER; note = uracil
  modified_base 282: mod_base = OTHER; note = uracil
  modified_base 284..285: mod_base = OTHER; note = uracil
  modified_base 287: mod_base = OTHER; note = uracil
  modified_base 289: mod_base = OTHER; note = uracil
  modified_base 293..294: mod_base = OTHER; note = uracil
  modified_base 297..298: mod_base = OTHER; note = uracil
  modified_base 300: mod_base = OTHER; note = uracil
  modified_base 15: mod_base = m5c
  modified_base 39: mod_base = m5c
  modified_base 50: mod_base = m5c
  modified_base 123: mod_base = m5c
  modified_base 158: mod_base = m5c
  variation 149: note = CpG site, residue is C if methylated or T(=U) if unmethylated
ggtggtagtggtgtcgttggtttattttttgtttatttcgtttattgggcgttgatttttggtttatgttaagattgagttattaagaatgttgaaaaattggtattatagttttaggttatcggaggtattaggaaattgttttattygaatttttcggattatttgtggggttgagagtagggtttagttaagaggggaatattattttttttttggttatatttttgtttttttgggtgtttttggtggaaaaggttgggagaaaataggatttaagtttttatatagatttattat

SEQ ID NO: 203 - DNA, 300 bp, synthetic construct
  source 1..300: mol_type = other DNA
  modified_base 3..4: mod_base = OTHER; note = uracil
  modified_base 7..8: mod_base = OTHER; note = uracil
  modified_base 10: mod_base = OTHER; note = uracil
  modified_base 12..13: mod_base = OTHER; note = uracil
  modified_base 26: mod_base = OTHER; note = uracil
  modified_base 39: mod_base = OTHER; note = uracil
  modified_base 44: mod_base = OTHER; note = uracil
  modified_base 49: mod_base = OTHER; note = uracil
  modified_base 60..62: mod_base = OTHER; note = uracil
  modified_base 70: mod_base = OTHER; note = uracil
  modified_base 73..74: mod_base = OTHER; note = uracil
  modified_base 76: mod_base = OTHER; note = uracil
  modified_base 79: mod_base = OTHER; note = uracil
  modified_base 97: mod_base = OTHER; note = uracil
  modified_base 133: mod_base = OTHER; note = uracil
  modified_base 146: mod_base = OTHER; note = uracil
  modified_base 155: mod_base = OTHER; note = uracil
  modified_base 172: mod_base = OTHER; note = uracil
  modified_base 177..178: mod_base = OTHER; note = uracil
  modified_base 188: mod_base = OTHER; note = uracil
  modified_base 197..198: mod_base = OTHER; note = uracil
  modified_base 202: mod_base = OTHER; note = uracil
  modified_base 207: mod_base = OTHER; note = uracil
  modified_base 209: mod_base = OTHER; note = uracil
  modified_base 213: mod_base = OTHER; note = uracil
  modified_base 243: mod_base = OTHER; note = uracil
  modified_base 248: mod_base = OTHER; note = uracil
  modified_base 251..253: mod_base = OTHER; note = uracil
  modified_base 256: mod_base = OTHER; note = uracil
  modified_base 264: mod_base = OTHER; note = uracil
  modified_base 281: mod_base = OTHER; note = uracil
  modified_base 15: mod_base = m5c
  modified_base 35: mod_base = m5c
  modified_base 65: mod_base = m5c
  modified_base 68: mod_base = m5c
  modified_base 80: mod_base = m5c
  modified_base 199: mod_base = m5c
  modified_base 295: mod_base = m5c
  variation 151: note = CpG site, residue is C if methylated or T(=U) if unmethylated
tgtttattatatttcgtgggtgaaatagatatttcgagtatgattgagtttattaagagttttgcggcgttttttttgtcgggggtttagaaattttaaaggatgggggttgagggagggaggagttatgggtatgtgatgtggatagggygggtaggaggatggaagtaataggtttaaaatgtatttttggtggttcggtagagtttttgtatggggtgagaatggtaatttaggaagagtaagtttttttatttgtgaagtagaagaaaaaagtggatttaaggagaagttcgggtg

SEQ ID NO: 204 - DNA, 300 bp, synthetic construct
  source 1..300: mol_type = other DNA
  modified_base 1: mod_base = OTHER; note = uracil
  modified_base 3..4: mod_base = OTHER; note = uracil
  modified_base 9: mod_base = OTHER; note = uracil
  modified_base 12: mod_base = OTHER; note = uracil
  modified_base 14..15: mod_base = OTHER; note = uracil
  modified_base 22..23: mod_base = OTHER; note = uracil
  modified_base 25: mod_base = OTHER; note = uracil
  modified_base 32: mod_base = OTHER; note = uracil
  modified_base 35: mod_base = OTHER; note = uracil
  modified_base 38: mod_base = OTHER; note = uracil
  modified_base 41: mod_base = OTHER; note = uracil
  modified_base 43: mod_base = OTHER; note = uracil
  modified_base 55: mod_base = OTHER; note = uracil
  modified_base 59: mod_base = OTHER; note = uracil
  modified_base 61: mod_base = OTHER; note = uracil
  modified_base 64..65: mod_base = OTHER; note = uracil
  modified_base 73..74: mod_base = OTHER; note = uracil
  modified_base 78: mod_base = OTHER; note = uracil
  modified_base 80: mod_base = OTHER; note = uracil
  modified_base 82..85: mod_base = OTHER; note = uracil
  modified_base 89: mod_base = OTHER; note = uracil
  modified_base 95: mod_base = OTHER; note = uracil
  modified_base 97: mod_base = OTHER; note = uracil
  modified_base 100: mod_base = OTHER; note = uracil
  modified_base 105..106: mod_base = OTHER; note = uracil
  modified_base 108..109: mod_base = OTHER; note = uracil
  modified_base 117: mod_base = OTHER; note = uracil
  modified_base 126..127: mod_base = OTHER; note = uracil
  modified_base 133: mod_base = OTHER; note = uracil
  modified_base 136..137: mod_base = OTHER; note = uracil
  modified_base 140..141: mod_base = OTHER; note = uracil
  modified_base 143..144: mod_base = OTHER; note = uracil
  modified_base 147..148: mod_base = OTHER; note = uracil
  modified_base 151..153: mod_base = OTHER; note = uracil
  modified_base 157..158: mod_base = OTHER; note = uracil
  modified_base 160: mod_base = OTHER; note = uracil
  modified_base 163: mod_base = OTHER; note = uracil
  modified_base 165: mod_base = OTHER; note = uracil
  modified_base 169..171: mod_base = OTHER; note = uracil
  modified_base 176: mod_base = OTHER; note = uracil
  modified_base 178..179: mod_base = OTHER; note = uracil
  modified_base 181..183: mod_base = OTHER; note = uracil
  modified_base 185..187: mod_base = OTHER; note = uracil
  modified_base 189: mod_base = OTHER; note = uracil
  modified_base 192..196: mod_base = OTHER; note = uracil
  modified_base 199..200: mod_base = OTHER; note = uracil
  modified_base 211: mod_base = OTHER; note = uracil
  modified_base 216..219: mod_base = OTHER; note = uracil
  modified_base 223: mod_base = OTHER; note = uracil
  modified_base 234: mod_base = OTHER; note = uracil
  modified_base 237: mod_base = OTHER; note = uracil
  modified_base 242: mod_base = OTHER; note = uracil
  modified_base 244: mod_base = OTHER; note = uracil
  modified_base 253: mod_base = OTHER; note = uracil
  modified_base 255: mod_base = OTHER; note = uracil
  modified_base 259: mod_base = OTHER; note = uracil
  modified_base 263: mod_base = OTHER; note = uracil
  modified_base 273: mod_base = OTHER; note = uracil
  modified_base 279: mod_base = OTHER; note = uracil
  modified_base 281..283: mod_base = OTHER; note = uracil
  modified_base 299: mod_base = OTHER; note = uracil
  modified_base 5: mod_base = m5c
  modified_base 101: mod_base = m5c
  modified_base 220: mod_base = m5c
  modified_base 232: mod_base = m5c
  modified_base 235: mod_base = m5c
  modified_base 265: mod_base = m5c
  modified_base 285: mod_base = m5c
  variation 149: note = CpG site, residue is C if methylated or T(=U) if unmethylated
tattcgaatttttttttaagtttattttttttttttgttttatagatgggaagatttgttttttttaaattattatttttattttatgtaagagttttgtcgggttattaaagatatattttggatttgttatttttatttttttgttygttttgtttatattatatgtttataattttttttttttttaatttttattttttgaaatttttaaattttcggtagaggaagcgtcgtagggtttttaataagtttagttatgttcgaaatatttgttttatttacgaggtgtggtaggta

SEQ ID NO: 205 - DNA, 300 bp, synthetic construct
  source 1..300: mol_type = other DNA
  modified_base 4..5: mod_base = OTHER; note = uracil
  modified_base 8..9: mod_base = OTHER; note = uracil
  modified_base 11: mod_base = OTHER; note = uracil
  modified_base 13..14: mod_base = OTHER; note = uracil
  modified_base 18: mod_base = OTHER; note = uracil
  modified_base 22..23: mod_base = OTHER; note = uracil
  modified_base 37..38: mod_base = OTHER; note = uracil
  modified_base 41..43: mod_base = OTHER; note = uracil
  modified_base 45: mod_base = OTHER; note = uracil
  modified_base 48: mod_base = OTHER; note = uracil
  modified_base 50: mod_base = OTHER; note = uracil
  modified_base 54..55: mod_base = OTHER; note = uracil
  modified_base 65: mod_base = OTHER; note = uracil
  modified_base 78: mod_base = OTHER; note = uracil
  modified_base 80..81: mod_base = OTHER; note = uracil
  modified_base 83: mod_base = OTHER; note = uracil
  modified_base 100..101: mod_base = OTHER; note = uracil
  modified_base 105..107: mod_base = OTHER; note = uracil
  modified_base 111: mod_base = OTHER; note = uracil
  modified_base 113: mod_base = OTHER; note = uracil
  modified_base 115: mod_base = OTHER; note = uracil
  modified_base 118: mod_base = OTHER; note = uracil
  modified_base 121: mod_base = OTHER; note = uracil
  modified_base 123: mod_base = OTHER; note = uracil
  modified_base 125: mod_base = OTHER; note = uracil
  modified_base 127: mod_base = OTHER; note = uracil
  modified_base 130: mod_base = OTHER; note = uracil
  modified_base 132: mod_base = OTHER; note = uracil
  modified_base 134: mod_base = OTHER; note = uracil
  modified_base 136..138: mod_base = OTHER; note = uracil
  modified_base 140: mod_base = OTHER; note = uracil
  modified_base 142..143: mod_base = OTHER; note = uracil
  modified_base 148: mod_base = OTHER; note = uracil
  modified_base 154..155: mod_base = OTHER; note = uracil
  modified_base 157: mod_base = OTHER; note = uracil
  modified_base 162..165: mod_base = OTHER; note = uracil
  modified_base 167: mod_base = OTHER; note = uracil
  modified_base 169: mod_base = OTHER; note = uracil
  modified_base 172..174: mod_base = OTHER; note = uracil
  modified_base 178: mod_base = OTHER; note = uracil
  modified_base 180: mod_base = OTHER; note = uracil
  modified_base 182: mod_base = OTHER; note = uracil
  modified_base 188..191: mod_base = OTHER; note = uracil
  modified_base 193: mod_base = OTHER; note = uracil
  modified_base 195: mod_base = OTHER; note = uracil
  modified_base 197: mod_base = OTHER; note = uracil
  modified_base 201: mod_base = OTHER; note = uracil
  modified_base 206..209: mod_base = OTHER; note = uracil
  modified_base 214: mod_base = OTHER; note = uracil
  modified_base 216: mod_base = OTHER; note = uracil
  modified_base 218: mod_base = OTHER; note = uracil
  modified_base 222..226: mod_base = OTHER; note = uracil
  modified_base 230: mod_base = OTHER; note = uracil
  modified_base 232: mod_base = OTHER; note = uracil
  modified_base 236: mod_base = OTHER; note = uracil
  modified_base 240..244: mod_base = OTHER; note = uracil
  modified_base 248: mod_base = OTHER; note = uracil
  modified_base 250: mod_base = OTHER; note = uracil
  modified_base 254: mod_base = OTHER; note = uracil
  modified_base 258: mod_base = OTHER; note = uracil
  modified_base 260: mod_base = OTHER; note = uracil
  modified_base 262: mod_base = OTHER; note = uracil
  modified_base 266: mod_base = OTHER; note = uracil
  modified_base 268: mod_base = OTHER; note = uracil
  modified_base 270: mod_base = OTHER; note = uracil
  modified_base 272: mod_base = OTHER; note = uracil
  modified_base 275: mod_base = OTHER; note = uracil
  modified_base 278..279: mod_base = OTHER; note = uracil
  modified_base 283..285: mod_base = OTHER; note = uracil
  modified_base 289: mod_base = OTHER; note = uracil
  modified_base 292: mod_base = OTHER; note = uracil
  modified_base 299: mod_base = OTHER; note = uracil
  modified_base 39: mod_base = m5c
  modified_base 102: mod_base = m5c
  modified_base 144: mod_base = m5c
  modified_base 152: mod_base = m5c
  modified_base 186: mod_base = m5c
  modified_base 220: mod_base = m5c
  modified_base 228: mod_base = m5c
  modified_base 234: mod_base = m5c
  modified_base 246: mod_base = m5c
  modified_base 252: mod_base = m5c
  variation 150: note = CpG site, residue is C if methylated or T(=U) if unmethylated
gagttaatttttttttttatttttggaggtgggggattcgtttttattttaggtttgaagagggttgtgtgtgagttttttatttgtgtgtggggtgagttcggtttatgtatatagttatatatatattatatatttatattcggataygcgttttaggtttttatattgtttttatatatatgcgttttttatatatgtatgttttttttgtatatacgttttttcgtatacgtatgttttttcgtatacgtatgtatataggtttattttgttgtttgtttttggttgttgtgtgtt

SEQ ID NO: 206 - DNA, 300 bp, synthetic construct
  source 1..300: mol_type = other DNA
  modified_base 3: mod_base = OTHER; note = uracil
  modified_base 5: mod_base = OTHER; note = uracil
  modified_base 7: mod_base = OTHER; note = uracil
  modified_base 10: mod_base = OTHER; note = uracil
  modified_base 13..14: mod_base = OTHER; note = uracil
  modified_base 20: mod_base = OTHER; note = uracil
  modified_base 24: mod_base = OTHER; note = uracil
  modified_base 27: mod_base = OTHER; note = uracil
  modified_base 36..37: mod_base = OTHER; note = uracil
  modified_base 44: mod_base = OTHER; note = uracil
  modified_base 62: mod_base = OTHER; note = uracil
  modified_base 88: mod_base = OTHER; note = uracil
  modified_base 97: mod_base = OTHER; note = uracil
  modified_base 101: mod_base = OTHER; note = uracil
  modified_base 116: mod_base = OTHER; note = uracil
  modified_base 130: mod_base = OTHER; note = uracil
  modified_base 141..142: mod_base = OTHER; note = uracil
  modified_base 155: mod_base = OTHER; note = uracil
  modified_base 184: mod_base = OTHER; note = uracil
  modified_base 191: mod_base = OTHER; note = uracil
  modified_base 197: mod_base = OTHER; note = uracil
  modified_base 202: mod_base = OTHER; note = uracil
  modified_base 204: mod_base = OTHER; note = uracil
  modified_base 206..209: mod_base = OTHER; note = uracil
  modified_base 211: mod_base = OTHER; note = uracil
  modified_base 213: mod_base = OTHER; note = uracil
  modified_base 215: mod_base = OTHER; note = uracil
  modified_base 226: mod_base = OTHER; note = uracil
  modified_base 228: mod_base = OTHER; note = uracil
  modified_base 230: mod_base = OTHER; note = uracil
  modified_base 232: mod_base = OTHER; note = uracil
  modified_base 234: mod_base = OTHER; note = uracil
  modified_base 237..239: mod_base = OTHER; note = uracil
  modified_base 241: mod_base = OTHER; note = uracil
  modified_base 244: mod_base = OTHER; note = uracil
  modified_base 248..249: mod_base = OTHER; note = uracil
  modified_base 266..270: mod_base = OTHER; note = uracil
  modified_base 272..273: mod_base = OTHER; note = uracil
  modified_base 275..276: mod_base = OTHER; note = uracil
  modified_base 298: mod_base = OTHER; note = uracil
  modified_base 300: mod_base = OTHER; note = uracil
  modified_base 48: mod_base = m5c
  modified_base 54: mod_base = m5c
  modified_base 66: mod_base = m5c
  modified_base 72: mod_base = m5c
  modified_base 80: mod_base = m5c
  modified_base 114: mod_base = m5c
  modified_base 148: mod_base = m5c
  modified_base 156: mod_base = m5c
  modified_base 198: mod_base = m5c
  modified_base 261: mod_base = m5c
  variation 150: note = CpG site, residue is C if methylated or T(=U) if unmethylated
agtatatagtagttagggataggtagtagagtgagtttgtgtgtatgcgtgtgcgagggggtatgcgtgtgcgagggggcgtgtgtgtaaaggggatatgtatgtgtgaggggcgtatgtgtgtaagggtagtgtggggatttgaggcgygtgttcgggtgtgggtgtgtgatgtgtgtgtagttgtgtgtatgggtcgggtttattttatatataagtggagaatttatatatagttttttttaggtttgagatgagggcgggttttttatttttaggaatgaaaggagaggttggttt

SEQ ID NO: 207 - DNA, 300 bp, synthetic construct
  source 1..300: mol_type = other DNA
  modified_base 1..3: mod_base = OTHER; note = uracil
  modified_base 11: mod_base = OTHER; note = uracil
  modified_base 15: mod_base = OTHER; note = uracil
  modified_base 17: mod_base = OTHER; note = uracil
  modified_base 29..31: mod_base = OTHER; note = uracil
  modified_base 33: mod_base = OTHER; note = uracil
  modified_base 49: mod_base = OTHER; note = uracil
  modified_base 60..61: mod_base = OTHER; note = uracil
  modified_base 69..70: mod_base = OTHER; note = uracil
  modified_base 98: mod_base = OTHER; note = uracil
  modified_base 101: mod_base = OTHER; note = uracil
  modified_base 107: mod_base = OTHER; note = uracil
  modified_base 118: mod_base = OTHER; note = uracil
  modified_base 120..122: mod_base = OTHER; note = uracil
  modified_base 124..125: mod_base = OTHER; note = uracil
  modified_base 145: mod_base = OTHER; note = uracil
  modified_base 154: mod_base = OTHER; note = uracil
  modified_base 157: mod_base = OTHER; note = uracil
  modified_base 163: mod_base = OTHER; note = uracil
  modified_base 169: mod_base = OTHER; note = uracil
  modified_base 178: mod_base = OTHER; note = uracil
  modified_base 181..185: mod_base = OTHER; note = uracil
  modified_base 194: mod_base = OTHER; note = uracil
  modified_base 198: mod_base = OTHER; note = uracil
  modified_base 204: mod_base = OTHER; note = uracil
  modified_base 207: mod_base = OTHER; note = uracil
  modified_base 210: mod_base = OTHER; note = uracil
  modified_base 215: mod_base = OTHER; note = uracil
  modified_base 219: mod_base = OTHER; note = uracil
  modified_base 237..238: mod_base = OTHER; note = uracil
  modified_base 241..242: mod_base = OTHER; note = uracil
  modified_base 245: mod_base = OTHER; note = uracil
  modified_base 261..262: mod_base = OTHER; note = uracil
  modified_base 265: mod_base = OTHER; note = uracil
  modified_base 275..277: mod_base = OTHER; note = uracil
  modified_base 279..280: mod_base = OTHER; note = uracil
  modified_base 287..289: mod_base = OTHER; note = uracil
  modified_base 293..294: mod_base = OTHER; note = uracil
  modified_base 297: mod_base = OTHER; note = uracil
  modified_base 299: mod_base = OTHER; note = uracil
  modified_base 5: mod_base = m5c
  modified_base 18: mod_base = m5c
  modified_base 47: mod_base = m5c
  modified_base 50: mod_base = m5c
  modified_base 127: mod_base = m5c
  modified_base 142: mod_base = m5c
  modified_base 155: mod_base = m5c
  modified_base 170: mod_base = m5c
  modified_base 230: mod_base = m5c
  modified_base 246: mod_base = m5c
  modified_base 259: mod_base = m5c
  modified_base 268: mod_base = m5c
  variation 151: note = CpG site, residue is C if methylated or T(=U) if unmethylated
tttacgggggtaggtatcggagggggtgtttatagaggatagaggacgtcgagaagtgatttggggagttataggatgaggaagagagaagagatgatagtaggggttgtaggaggttattttttacggagggaggggtgacggtagaggygttcgtaggagttggtatcggtggggttgtttttagggggggttgatagaggtagtaattgagtaggtaggggtggagcgaggtgttagtttgtcgtggaaaggagacgttagtagcggggggtttttttggggttttagttttgtttt

SEQ ID NO: 208 - DNA, 300 bp, synthetic construct
  source 1..300: mol_type = other DNA
  modified_base 5: mod_base = OTHER; note = uracil
  modified_base 10: mod_base = OTHER; note = uracil
  modified_base 16..19: mod_base = OTHER; note = uracil
  modified_base 27..31: mod_base = OTHER; note = uracil
  modified_base 34: mod_base = OTHER; note = uracil
  modified_base 37: mod_base = OTHER; note = uracil
  modified_base 44: mod_base = OTHER; note = uracil
  modified_base 46..47: mod_base = OTHER; note = uracil
  modified_base 51..52: mod_base = OTHER; note = uracil
  modified_base 57: mod_base = OTHER; note = uracil
  modified_base 61: mod_base = OTHER; note = uracil
  modified_base 65: mod_base = OTHER; note = uracil
  modified_base 67..68: mod_base = OTHER; note = uracil
  modified_base 72: mod_base = OTHER; note = uracil
  modified_base 74..75: mod_base = OTHER; note = uracil
  modified_base 77..80: mod_base = OTHER; note = uracil
  modified_base 83..84: mod_base = OTHER; note = uracil
  modified_base 87: mod_base = OTHER; note = uracil
  modified_base 89: mod_base = OTHER; note = uracil
  modified_base 95: mod_base = OTHER; note = uracil
  modified_base 98..99: mod_base = OTHER; note = uracil
  modified_base 101: mod_base = OTHER; note = uracil
  modified_base 105: mod_base = OTHER; note = uracil
  modified_base 108..114: mod_base = OTHER; note = uracil
  modified_base 121: mod_base = OTHER; note = uracil
  modified_base 124..127: mod_base = OTHER; note = uracil
  modified_base 129: mod_base = OTHER; note = uracil
  modified_base 135..136: mod_base = OTHER; note = uracil
  modified_base 139: mod_base = OTHER; note = uracil
  modified_base 141..142: mod_base = OTHER; note = uracil
  modified_base 151..152: mod_base = OTHER; note = uracil
  modified_base 154: mod_base = OTHER; note = uracil
  modified_base 157: mod_base = OTHER; note = uracil
  modified_base 161: mod_base = OTHER; note = uracil
  modified_base 163..166: mod_base = OTHER; note = uracil
  modified_base 168..170: mod_base = OTHER; note = uracil
  modified_base 172: mod_base = OTHER; note = uracil
  modified_base 185..186: mod_base = OTHER; note = uracil
  modified_base 188..189: mod_base = OTHER; note = uracil
  modified_base 192: mod_base = OTHER; note = uracil
  modified_base 195..198: mod_base = OTHER; note = uracil
  modified_base 201: mod_base = OTHER; note = uracil
  modified_base 205: mod_base = OTHER; note = uracil
  modified_base 208: mod_base = OTHER; note = uracil
  modified_base 210: mod_base = OTHER; note = uracil
  modified_base 213: mod_base = OTHER; note = uracil
  modified_base 215: mod_base = OTHER; note = uracil
  modified_base 217: mod_base = OTHER; note = uracil
  modified_base 220..221: mod_base = OTHER; note = uracil
  modified_base 223: mod_base = OTHER; note = uracil
  modified_base 226..227: mod_base = OTHER; note = uracil
  modified_base 233: mod_base = OTHER; note = uracil
  modified_base 235..238: mod_base = OTHER; note = uracil
  modified_base 243: mod_base = OTHER; note = uracil
  modified_base 245: mod_base = OTHER; note = uracil
  modified_base 248: mod_base = OTHER; note = uracil
  modified_base 256..257: mod_base = OTHER; note = uracil
  modified_base 259: mod_base = OTHER; note = uracil
  modified_base 263..264: mod_base = OTHER; note = uracil
  modified_base 266: mod_base = OTHER; note = uracil
  modified_base 273: mod_base = OTHER; note = uracil
  modified_base 275..279: mod_base = OTHER; note = uracil
  modified_base 281: mod_base = OTHER; note = uracil
  modified_base 287..288: mod_base = OTHER; note = uracil
  modified_base 291..294: mod_base = OTHER; note = uracil
  modified_base 32: mod_base = m5c
  modified_base 41: mod_base = m5c
  modified_base 54: mod_base = m5c
  modified_base 70: mod_base = m5c
  modified_base 130: mod_base = m5c
  modified_base 145: mod_base = m5c
  modified_base 158: mod_base = m5c
  modified_base 173: mod_base = m5c
  modified_base 250: mod_base = m5c
  modified_base 253: mod_base = m5c
  modified_base 282: mod_base = m5c
  modified_base 295: mod_base = m5c
  variation 149: note = CpG site, residue is C if methylated or T(=U) if unmethylated
agagtaggattgggattttaggagggtttttcgttgttggcgttttttttttacggtaggttggtatttcgttttatttttgtttgtttagttgttgtttttgttagttttttttgggggtagttttatcggtattagtttttgcggaygtttttgtcgttattttttttttcgtggagggtgattttttatagtttttgttgttatttttttttttttttttattttatggttttttaggttatttttcggcgttttttattttttgtgggtatttttttcggtgtttgttttcgtggg

SEQ ID NO: 209 - DNA, 300 bp, synthetic construct
  source 1..300: mol_type = other DNA
  modified_base 4: mod_base = OTHER; note = uracil
  modified_base 6: mod_base = OTHER; note = uracil
  modified_base 8: mod_base = OTHER; note = uracil
  modified_base 14..15: mod_base = OTHER; note = uracil
  modified_base 21: mod_base = OTHER; note = uracil
  modified_base 25..27: mod_base = OTHER; note = uracil
  modified_base 30..32: mod_base = OTHER; note = uracil
  modified_base 34..37: mod_base = OTHER; note = uracil
  modified_base 40..43: mod_base = OTHER; note = uracil
  modified_base 48..49: mod_base = OTHER; note = uracil
  modified_base 52: mod_base = OTHER; note = uracil
  modified_base 56..57: mod_base = OTHER; note = uracil
  modified_base 66: mod_base = OTHER; note = uracil
  modified_base 68..69: mod_base = OTHER; note = uracil
  modified_base 72: mod_base = OTHER; note = uracil
  modified_base 74: mod_base = OTHER; note = uracil
  modified_base 90: mod_base = OTHER; note = uracil
  modified_base 92..95: mod_base = OTHER; note = uracil
  modified_base 97: mod_base = OTHER; note = uracil
  modified_base 101: mod_base = OTHER; note = uracil
  modified_base 106..107: mod_base = OTHER; note = uracil
  modified_base 112: mod_base = OTHER; note = uracil
  modified_base 115..116: mod_base = OTHER; note = uracil
  modified_base 118: mod_base = OTHER; note = uracil
  modified_base 134..135: mod_base = OTHER; note = uracil
  modified_base 138: mod_base = OTHER; note = uracil
  modified_base 146: mod_base = OTHER; note = uracil
  modified_base 155: mod_base = OTHER; note = uracil
  modified_base 167..168: mod_base = OTHER; note = uracil
  modified_base 173: mod_base = OTHER; note = uracil
  modified_base 183: mod_base = OTHER; note = uracil
  modified_base 193..194: mod_base = OTHER; note = uracil
  modified_base 197: mod_base = OTHER; note = uracil
  modified_base 199: mod_base = OTHER; note = uracil
  modified_base 203..205: mod_base = OTHER; note = uracil
  modified_base 210: mod_base = OTHER; note = uracil
  modified_base 214: mod_base = OTHER; note = uracil
  modified_base 216..217: mod_base = OTHER; note = uracil
  modified_base 221: mod_base = OTHER; note = uracil
  modified_base 223..224: mod_base = OTHER; note = uracil
  modified_base 227..228: mod_base = OTHER; note = uracil
  modified_base 232: mod_base = OTHER; note = uracil
  modified_base 236: mod_base = OTHER; note = uracil
  modified_base 240: mod_base = OTHER; note = uracil
  modified_base 247..248: mod_base = OTHER; note = uracil
  modified_base 250: mod_base = OTHER; note = uracil
  modified_base 254: mod_base = OTHER; note = uracil
  modified_base 260: mod_base = OTHER; note = uracil
  modified_base 269: mod_base = OTHER; note = uracil
  modified_base 276: mod_base = OTHER; note = uracil
  modified_base 278: mod_base = OTHER; note = uracil
  modified_base 280: mod_base = OTHER; note = uracil
  modified_base 287: mod_base = OTHER; note = uracil
  modified_base 290: mod_base = OTHER; note = uracil
  modified_base 292: mod_base = OTHER; note = uracil
  modified_base 298: mod_base = OTHER; note = uracil
  modified_base 75: mod_base = m5c
  modified_base 102: mod_base = m5c
  modified_base 184: mod_base = m5c
  modified_base 225: mod_base = m5c
  variation 150: note = CpG site, residue is C if methylated or T(=U) if unmethylated
tgatatttaggatttaaaagttagttttgtttattttagtttttggatttgtttatttgggtgtgtatttgtttcggggggtggaggtgttttttatagttcgggttaggatagttttaggggagagtgaaggtttgtaggagggtaggygagataaggagggtgtttagggttagggagtgtcggatgaaattagttttgtttttgtgtaggttttaggttttcgtttgataaataggtagggagttatagttagggataataaaaatttggtgtattttgaaagtagtatttggatag

SEQ ID NO: 210 - DNA, 300 bp, synthetic construct
  source 1..300: mol_type = other DNA
  modified_base 4..5: mod_base = OTHER; note = uracil
  modified_base 11: mod_base = OTHER; note = uracil
  modified_base 14: mod_base = OTHER; note = uracil
  modified_base 18: mod_base = OTHER; note = uracil
  modified_base 25: mod_base = OTHER; note = uracil
  modified_base 27..28: mod_base = OTHER; note = uracil
  modified_base 42..44: mod_base = OTHER; note = uracil
  modified_base 48: mod_base = OTHER; note = uracil
  modified_base 54: mod_base = OTHER; note = uracil
  modified_base 56..58: mod_base = OTHER; note = uracil
  modified_base 61..62: mod_base = OTHER; note = uracil
  modified_base 70: mod_base = OTHER; note = uracil
  modified_base 80..81: mod_base = OTHER; note = uracil
  modified_base 87..88: mod_base = OTHER; note = uracil
  modified_base 91: mod_base = OTHER; note = uracil
  modified_base 93: mod_base = OTHER; note = uracil
  modified_base 99: mod_base = OTHER; note = uracil
  modified_base 104: mod_base = OTHER; note = uracil
  modified_base 111: mod_base = OTHER; note = uracil
  modified_base 114: mod_base = OTHER; note = uracil
  modified_base 118: mod_base = OTHER; note = uracil
  modified_base 120: mod_base = OTHER; note = uracil
  modified_base 122..124: mod_base = OTHER; note = uracil
  modified_base 128..130: mod_base = OTHER; note = uracil
  modified_base 135: mod_base = OTHER; note = uracil
  modified_base 137..139: mod_base = OTHER; note = uracil
  modified_base 141..142: mod_base = OTHER; note = uracil
  modified_base 147: mod_base = OTHER; note = uracil
  modified_base 151..152: mod_base = OTHER; note = uracil
  modified_base 155..157: mod_base = OTHER; note = uracil
  modified_base 159..160: mod_base = OTHER; note = uracil
  modified_base 163: mod_base = OTHER; note = uracil
  modified_base 167..168: mod_base = OTHER; note = uracil
  modified_base 171: mod_base = OTHER; note = uracil
  modified_base 173: mod_base = OTHER; note = uracil
  modified_base 175: mod_base = OTHER; note = uracil
  modified_base 177..180: mod_base = OTHER; note = uracil
  modified_base 186: mod_base = OTHER; note = uracil
  modified_base 190..191: mod_base = OTHER; note = uracil
  modified_base 195..196: mod_base = OTHER; note = uracil
  modified_base 201: mod_base = OTHER; note = uracil
  modified_base 211: mod_base = OTHER; note = uracil
  modified_base 213..214: mod_base = OTHER; note = uracil
  modified_base 216..217: mod_base = OTHER; note = uracil
  modified_base 219..223: mod_base = OTHER; note = uracil
  modified_base 229: mod_base = OTHER; note = uracil
  modified_base 235: mod_base = OTHER; note = uracil
  modified_base 237: mod_base = OTHER; note = uracil
  modified_base 239..241: mod_base = OTHER; note = uracil
  modified_base 249: mod_base = OTHER; note = uracil
  modified_base 254..255: mod_base = OTHER; note = uracil
  modified_base 261: mod_base = OTHER; note = uracil
  modified_base 271: mod_base = OTHER; note = uracil
  modified_base 276: mod_base = OTHER; note = uracil
  modified_base 280: mod_base = OTHER; note = uracil
  modified_base 289..290: mod_base = OTHER; note = uracil
  modified_base 298: mod_base = OTHER; note = uracil
  modified_base 300: mod_base = OTHER; note = uracil
  modified_base 74: mod_base = m5c
  modified_base 115: mod_base = m5c
  modified_base 197: mod_base = m5c
  modified_base 224: mod_base = m5c
  variation 149: note = CpG site, residue is C if methylated or T(=U) if unmethylated
tgtttaagtgttgtttttagagtgtattaagtttttattgtttttgattgtggttttttgtttgtttgttaggcgggagtttggagtttgtatagggatagagttggttttattcggtattttttagttttggatattttttttgtttygtttgtttttttgtaggtttttatttttttttgaggttgttttggttcggattgtggggagtatttttatttttcggagtaggtgtatatttaggtaagtaggtttaggggttggggtgggtagggttagtttttggattttgagtgttat

SEQ ID NO: 211 - DNA, 300 bp, synthetic construct
  source 1..300: mol_type = other DNA
  modified_base 1: mod_base = OTHER; note = uracil
  modified_base 15..16: mod_base = OTHER; note = uracil
  modified_base 18: mod_base = OTHER; note = uracil
  modified_base 25: mod_base = OTHER; note = uracil
  modified_base 27: mod_base = OTHER; note = uracil
  modified_base 40: mod_base = OTHER; note = uracil
  modified_base 42: mod_base = OTHER; note = uracil
  modified_base 46..49: mod_base = OTHER; note = uracil
  modified_base 56..57: mod_base = OTHER; note = uracil
  modified_base 61: mod_base = OTHER; note = uracil
  modified_base 63: mod_base = OTHER; note = uracil
  modified_base 73: mod_base = OTHER; note = uracil
  modified_base 75: mod_base = OTHER; note = uracil
  modified_base 85: mod_base = OTHER; note = uracil
  modified_base 96: mod_base = OTHER; note = uracil
  modified_base 102: mod_base = OTHER; note = uracil
  modified_base 104: mod_base = OTHER; note = uracil
  modified_base 114: mod_base = OTHER; note = uracil
  modified_base 118: mod_base = OTHER; note = uracil
  modified_base 132..134: mod_base = OTHER; note = uracil
  modified_base 136: mod_base = OTHER; note = uracil
  modified_base 138: mod_base = OTHER; note = uracil
  modified_base 144: mod_base = OTHER; note = uracil
  modified_base 148: mod_base = OTHER; note = uracil
  modified_base 153: mod_base = OTHER; note = uracil
  modified_base 161: mod_base = OTHER; note = uracil
  modified_base 164..165: mod_base = OTHER; note = uracil
  modified_base 168: mod_base = OTHER; note = uracil
  modified_base 170: mod_base = OTHER; note = uracil
  modified_base 176: mod_base = OTHER; note = uracil
  modified_base 178: mod_base = OTHER; note = uracil
  modified_base 197..198: mod_base = OTHER; note = uracil
  modified_base 200..201: mod_base = OTHER; note = uracil
  modified_base 203: mod_base = OTHER; note = uracil
  modified_base 206: mod_base = OTHER; note = uracil
  modified_base 212: mod_base = OTHER; note = uracil
  modified_base 216: mod_base = OTHER; note = uracil
  modified_base 224: mod_base = OTHER; note = uracil
  modified_base 232: mod_base = OTHER; note = uracil
  modified_base 237..238: mod_base = OTHER; note = uracil
  modified_base 244: mod_base = OTHER; note = uracil
  modified_base 247: mod_base = OTHER; note = uracil
  modified_base 252: mod_base = OTHER; note = uracil
  modified_base 257: mod_base = OTHER; note = uracil
  modified_base 265: mod_base = OTHER; note = uracil
  modified_base 267: mod_base = OTHER; note = uracil
  modified_base 271..272: mod_base = OTHER; note = uracil
  modified_base 278..281: mod_base = OTHER; note = uracil
  modified_base 284: mod_base = OTHER; note = uracil
  modified_base 291: mod_base = OTHER; note = uracil
  modified_base 31: mod_base = m5c
  modified_base 54: mod_base = m5c
  modified_base 88: mod_base = m5c
  modified_base 91: mod_base = m5c
  modified_base 139: mod_base = m5c
  modified_base 253: mod_base = m5c
  variation 150: note = CpG site, residue is C if methylated or T(=U) if unmethylated
taaataagtagttattttagaagttatttacgtaaaagatttattttttaaaacgttaggtatatggattattattgtgttatttaacgacgatataatggtatagaatgtattatattgagaagtgagtgtttttttcgggatatattygttagtgagttatttagtattagaatattggagatataaataaatattattttttttaaaatagtttgaaatttaagtggttataatttagagtattatggtcgggtatggtggtttatgtttgtaattttagtatgaggttgagatggg

SEQ ID NO: 212 - DNA, 300 bp, synthetic construct
  source 1..300: mol_type = other DNA
  modified_base 1..2: mod_base = OTHER; note = uracil
  modified_base 5: mod_base = OTHER; note = uracil
  modified_base 7: mod_base = OTHER; note = uracil
  modified_base 10..11: mod_base = OTHER; note = uracil
  modified_base 13: mod_base = OTHER; note = uracil
  modified_base 17: mod_base = OTHER; note = uracil
  modified_base 26: mod_base = OTHER; note = uracil
  modified_base 30: mod_base = OTHER; note = uracil
  modified_base 36..37: mod_base = OTHER; note = uracil
  modified_base 39..40: mod_base = OTHER; note = uracil
  modified_base 44..45: mod_base = OTHER; note = uracil
  modified_base 49..50: mod_base = OTHER; note = uracil
  modified_base 57: mod_base = OTHER; note = uracil
  modified_base 59: mod_base = OTHER; note = uracil
  modified_base 70..71: mod_base = OTHER; note = uracil
  modified_base 73: mod_base = OTHER; note = uracil
  modified_base 82: mod_base = OTHER; note = uracil
  modified_base 86: mod_base = OTHER; note = uracil
  modified_base 117: mod_base = OTHER; note = uracil
  modified_base 119..120: mod_base = OTHER; note = uracil
  modified_base 127: mod_base = OTHER; note = uracil
  modified_base 133: mod_base = OTHER; note = uracil
  modified_base 141: mod_base = OTHER; note = uracil
  modified_base 143: mod_base = OTHER; note = uracil
  modified_base 145: mod_base = OTHER; note = uracil
  modified_base 158..159: mod_base = OTHER; note = uracil
  modified_base 169: mod_base = OTHER; note = uracil
  modified_base 171: mod_base = OTHER; note = uracil
  modified_base 173: mod_base = OTHER; note = uracil
  modified_base 175: mod_base = OTHER; note = uracil
  modified_base 178: mod_base = OTHER; note = uracil
  modified_base 180: mod_base = OTHER; note = uracil
  modified_base 190: mod_base = OTHER; note = uracil
  modified_base 194: mod_base = OTHER; note = uracil
  modified_base 199..200: mod_base = OTHER; note = uracil
  modified_base 221: mod_base = OTHER; note = uracil
  modified_base 223: mod_base = OTHER; note = uracil
  modified_base 233..234: mod_base = OTHER; note = uracil
  modified_base 240..241: mod_base = OTHER; note = uracil
  modified_base 262: mod_base = OTHER; note = uracil
  modified_base 277: mod_base = OTHER; note = uracil
  modified_base 280: mod_base = OTHER; note = uracil
  modified_base 289: mod_base = OTHER; note = uracil
  modified_base 292: mod_base = OTHER; note = uracil
  modified_base 46: mod_base = m5c
  modified_base 160: mod_base = m5c
  modified_base 208: mod_base = m5c
  modified_base 211: mod_base = m5c
  modified_base 245: mod_base = m5c
  modified_base 268: mod_base = m5c
  variation 149: note = CpG site, residue is C if methylated or T(=U) if unmethylated
ttattttagttttatgttggggttataggtatgagttattatgttcggttatgatgttttaggttatgattatttgaattttagattgttttagaagaggtggtatttatttatatttttagtgttttagtgttggatgatttattgaygagtatgtttcggagagggtatttattttttagtatgatatattttgtgttattgtatcgtcgttgaataatatagtgataatttatgtgtttggcgttttggggaatgagttttttacgtaagtgatttttgaggtaattatttatttga

SEQ ID NO: 213 - DNA, 300 bp, synthetic construct
  source 1..300: mol_type = other DNA
  modified_base 3..4: mod_base = OTHER; note = uracil
  modified_base 6: mod_base = OTHER; note = uracil
  modified_base 8: mod_base = OTHER; note = uracil
  modified_base 15: mod_base = OTHER; note = uracil
  modified_base 17: mod_base = OTHER; note = uracil
  modified_base 26..27: mod_base = OTHER; note = uracil
  modified_base 29: mod_base = OTHER; note = uracil
  modified_base 32: mod_base = OTHER; note = uracil
  modified_base 43: mod_base = OTHER; note = uracil
  modified_base 47: mod_base = OTHER; note = uracil
  modified_base 49: mod_base = OTHER; note = uracil
  modified_base 53: mod_base = OTHER; note = uracil
  modified_base 57: mod_base = OTHER; note = uracil
  modified_base 65: mod_base = OTHER; note = uracil
  modified_base 69: mod_base = OTHER; note = uracil
  modified_base 72: mod_base = OTHER; note = uracil
  modified_base 74: mod_base = OTHER; note = uracil
  modified_base 76: mod_base = OTHER; note = uracil
  modified_base 78: mod_base = OTHER; note = uracil
  modified_base 88: mod_base = OTHER; note = uracil
  modified_base 90: mod_base = OTHER; note = uracil
  modified_base 93: mod_base = OTHER; note = uracil
  modified_base 99: mod_base = OTHER; note = uracil
  modified_base 105: mod_base = OTHER; note = uracil
  modified_base 109..111: mod_base = OTHER; note = uracil
  modified_base 113..115: mod_base = OTHER; note = uracil
  modified_base 122: mod_base = OTHER; note = uracil
  modified_base 130: mod_base = OTHER; note = uracil
  modified_base 132: mod_base = OTHER; note = uracil
  modified_base 135: mod_base = OTHER; note = uracil
  modified_base 157: mod_base = OTHER; note = uracil
  modified_base 161: mod_base = OTHER; note = uracil
  modified_base 163..164: mod_base = OTHER; note = uracil
  modified_base 169..170: mod_base = OTHER; note = uracil
  modified_base 189: mod_base = OTHER; note = uracil
  modified_base 191: mod_base = OTHER; note = uracil
  modified_base 195..196: mod_base = OTHER; note = uracil
  modified_base 198: mod_base = OTHER; note = uracil
  modified_base 200: mod_base = OTHER; note = uracil
  modified_base 209: mod_base = OTHER; note = uracil
  modified_base 214..215: mod_base = OTHER; note = uracil
  modified_base 221: mod_base = OTHER; note = uracil
  modified_base 235: mod_base = OTHER; note = uracil
  modified_base 240..241: mod_base = OTHER; note = uracil
  modified_base 252..255: mod_base = OTHER; note = uracil
  modified_base 257..258: mod_base = OTHER; note = uracil
  modified_base 268: mod_base = OTHER; note = uracil
  modified_base 275..276: mod_base = OTHER; note = uracil
  modified_base 284: mod_base = OTHER; note = uracil
  modified_base 298..299: mod_base = OTHER; note = uracil
  modified_base 18: mod_base = m5c
  modified_base 59: mod_base = m5c
  modified_base 116: mod_base = m5c
  modified_base 154: mod_base = m5c
  modified_base 171: mod_base = m5c
  modified_base 264: mod_base = m5c
  modified_base 272: mod_base = m5c
  modified_base 296: mod_base = m5c
  variation 150: note = CpG site, residue is C if methylated or T(=U) if unmethylated
gtttttatatttgatttcggataaatttttttaaatattttatagattttggttttttcgttaataagtagtttatatatatagtgttttagtagtgatagatgttggtttatttcgaggttaggatgatttagtagggattgagtttgygggcgttatgttttaaggttcggaataggaggttggtgtttattttttatatagtgggtaaattttagggtaggggagggggggtaatgttagagaatggtttttatttggggcggtttgacggttagagatgtagagaaagagacgttt

SEQ ID NO: 214 - DNA, 300 bp, synthetic construct
  source 1..300: mol_type = other DNA
  modified_base 7: mod_base = OTHER; note = uracil
  modified_base 9: mod_base = OTHER; note = uracil
  modified_base 13: mod_base = OTHER; note = uracil
  modified_base 15: mod_base = OTHER; note = uracil
  modified_base 18: mod_base = OTHER; note = uracil
  modified_base 21: mod_base = OTHER; note = uracil
  modified_base 23: mod_base = OTHER; note = uracil
  modified_base 27: mod_base = OTHER; note = uracil
  modified_base 31: mod_base = OTHER; note = uracil
  modified_base 35: mod_base = OTHER; note = uracil
  modified_base 38..41: mod_base = OTHER; note = uracil
  modified_base 51..52: mod_base = OTHER; note = uracil
  modified_base 56: mod_base = OTHER; note = uracil
  modified_base 58: mod_base = OTHER; note = uracil
  modified_base 62: mod_base = OTHER; note = uracil
  modified_base 67..73: mod_base = OTHER; note = uracil
  modified_base 75..78: mod_base = OTHER; note = uracil
  modified_base 81..83: mod_base = OTHER; note = uracil
  modified_base 93..95: mod_base = OTHER; note = uracil
  modified_base 97: mod_base = OTHER; note = uracil
  modified_base 113: mod_base = OTHER; note = uracil
  modified_base 115..116: mod_base = OTHER; note = uracil
  modified_base 119..120: mod_base = OTHER; note = uracil
  modified_base 122..123: mod_base = OTHER; note = uracil
  modified_base 128: mod_base = OTHER; note = uracil
  modified_base 133..134: mod_base = OTHER; note = uracil
  modified_base 141: mod_base = OTHER; note = uracil
  modified_base 148..149: mod_base = OTHER; note = uracil
  modified_base 152: mod_base = OTHER; note = uracil
  modified_base 156: mod_base = OTHER; note = uracil
  modified_base 158: mod_base = OTHER; note = uracil
  modified_base 162..164: mod_base = OTHER; note = uracil
  modified_base 167: mod_base = OTHER; note = uracil
  modified_base 173: mod_base = OTHER; note = uracil
  modified_base 176..177: mod_base = OTHER; note = uracil
  modified_base 181..182: mod_base = OTHER; note = uracil
  modified_base 193..194: mod_base = OTHER; note = uracil
  modified_base 197: mod_base = OTHER; note = uracil
  modified_base 200: mod_base = OTHER; note = uracil
  modified_base 204: mod_base = OTHER; note = uracil
  modified_base 206: mod_base = OTHER; note = uracil
  modified_base 209: mod_base = OTHER; note = uracil
  modified_base 215: mod_base = OTHER; note = uracil
  modified_base 217: mod_base = OTHER; note = uracil
  modified_base 230: mod_base = OTHER; note = uracil
  modified_base 233: mod_base = OTHER; note = uracil
  modified_base 249..250: mod_base = OTHER; note = uracil
  modified_base 256: mod_base = OTHER; note = uracil
  modified_base 281: mod_base = OTHER; note = uracil
  modified_base 288: mod_base = OTHER; note = uracil
  modified_base 300: mod_base = OTHER; note = uracil
  modified_base 4: mod_base = m5c
  modified_base 28: mod_base = m5c
  modified_base 36: mod_base = m5c
  modified_base 129: mod_base = m5c
  modified_base 146: mod_base = m5c
  modified_base 184: mod_base = m5c
  modified_base 241: mod_base = m5c
  modified_base 282: mod_base = m5c
  variation 150: note = CpG site, residue is C if methylated or T(=U) if unmethylated
aggcgtttttttttttgtatttttggtcgttagatcgttttaggtggggattattttttggtattgtttttttttttttgttttaggatttgtttattatgtgaggaatgagtattaattttttatttcgggttttggagtatgacgttygtaaatttaatttttgttgagttattttgatttcggggtgggttagtatttgttattgttgagatattatatgtgtgagttgtttgttaacgagaaagttagagtttgtaaaatatttgaagaggtttattcggagttaaatgtgaggat

SEQ ID NO: 215 - DNA, 299 bp, synthetic construct
  source 1..299: mol_type = other DNA
  modified_base 6: mod_base = OTHER; note = uracil
  modified_base 9..11: mod_base = OTHER; note = uracil
  modified_base 13: mod_base = OTHER; note = uracil
  modified_base 15..17: mod_base = OTHER; note = uracil
  modified_base 20..22: mod_base = OTHER; note = uracil
  modified_base 34..36: mod_base = OTHER; note = uracil
  modified_base 41: mod_base = OTHER; note = uracil
  modified_base 50..52: mod_base = OTHER; note = uracil
  modified_base 54: mod_base = OTHER; note = uracil
  modified_base 57: mod_base = OTHER; note = uracil
  modified_base 69: mod_base = OTHER; note = uracil
  modified_base 80: mod_base = OTHER; note = uracil
  modified_base 82: mod_base = OTHER; note = uracil
  modified_base 90: mod_base = OTHER; note = uracil
  modified_base 98..99: mod_base = OTHER; note = uracil
  modified_base 102: mod_base = OTHER; note = uracil
  modified_base 105: mod_base = OTHER; note = uracil
  modified_base 111: mod_base = OTHER; note = uracil
  modified_base 115: mod_base = OTHER; note = uracil
  modified_base 117: mod_base = OTHER; note = uracil
  modified_base 119..120: mod_base = OTHER; note = uracil
  modified_base 124: mod_base = OTHER; note = uracil
  modified_base 126: mod_base = OTHER; note = uracil
  modified_base 134: mod_base = OTHER; note = uracil
  modified_base 142: mod_base = OTHER; note = uracil
  modified_base 160: mod_base = OTHER; note = uracil
  modified_base 166: mod_base = OTHER; note = uracil
  modified_base 169..170: mod_base = OTHER; note = uracil
  modified_base 180: mod_base = OTHER; note = uracil
  modified_base 189: mod_base = OTHER; note = uracil
  modified_base 192: mod_base = OTHER; note = uracil
  modified_base 203: mod_base = OTHER; note = uracil
  modified_base 205: mod_base = OTHER; note = uracil
  modified_base 209..211: mod_base = OTHER; note = uracil
  modified_base 213: mod_base = OTHER; note = uracil
  modified_base 215: mod_base = OTHER; note = uracil
  modified_base 219..220: mod_base = OTHER; note = uracil
  modified_base 222: mod_base = OTHER; note = uracil
  modified_base 224..225: mod_base = OTHER; note = uracil
  modified_base 228..229: mod_base = OTHER; note = uracil
  modified_base 231..232: mod_base = OTHER; note = uracil
  modified_base 236..237: mod_base = OTHER; note = uracil
  modified_base 241..242: mod_base = OTHER; note = uracil
  modified_base 249..250: mod_base = OTHER; note = uracil
  modified_base 252: mod_base = OTHER; note = uracil
  modified_base 254: mod_base = OTHER; note = uracil
  modified_base 256..257: mod_base = OTHER; note = uracil
  modified_base 259: mod_base = OTHER; note = uracil
  modified_base 264: mod_base = OTHER; note = uracil
  modified_base 271: mod_base = OTHER; note = uracil
  modified_base 290: mod_base = OTHER; note = uracil
  modified_base 298: mod_base = OTHER; note = uracil
  modified_base 37: mod_base = m5c
  modified_base 42: mod_base = m5c
  modified_base 65: mod_base = m5c
  modified_base 135: mod_base = m5c
  modified_base 206: mod_base = m5c
  modified_base 260: mod_base = m5c
  modified_base 285: mod_base = m5c
  modified_base 291: mod_base = m5c
  variation 130: note = CpG site, residue is C if methylated or T(=U) if unmethylated
  variation 172: note = CpG site, residue is C if methylated or T(=U) if unmethylated
gaaagtagttttttttttgttttgtaaggtgattttcgattcgggaatttttatttttgaaggacgttttggaaaagtgtatagattaattgagatttttgtttttggattaagtatttttgatattatygtttcgattttttaaaaaagagattgtggtaaaatttatttygtgagattagaaaatgtagtagggatgaattatcggtttttttagattttattagtttttaggttatttttaagagttttattttttcgttttgttggtagtgggggaggtacggggtcggatggta

SEQ ID NO: 216 - DNA, 300 bp, synthetic construct
  source 1..300: mol_type = other DNA
  modified_base 3..4: mod_base = OTHER; note = uracil
  modified_base 7: mod_base = OTHER; note = uracil
  modified_base 11..13: mod_base = OTHER; note = uracil
  modified_base 18..19: mod_base = OTHER; note = uracil
  modified_base 21..25: mod_base = OTHER; note = uracil
  modified_base 27: mod_base = OTHER; note = uracil
  modified_base 30..31: mod_base = OTHER; note = uracil
  modified_base 34: mod_base = OTHER; note = uracil
  modified_base 52: mod_base = OTHER; note = uracil
  modified_base 54: mod_base = OTHER; note = uracil
  modified_base 65..66: mod_base = OTHER; note = uracil
  modified_base 73: mod_base = OTHER; note = uracil
  modified_base 83: mod_base = OTHER; note = uracil
  modified_base 92: mod_base = OTHER; note = uracil
  modified_base 101: mod_base = OTHER; note = uracil
  modified_base 104..106: mod_base = OTHER; note = uracil
  modified_base 109: mod_base = OTHER; note = uracil
  modified_base 112: mod_base = OTHER; note = uracil
  modified_base 118: mod_base = OTHER; note = uracil
  modified_base 123: mod_base = OTHER; note = uracil
  modified_base 125: mod_base = OTHER; note = uracil
  modified_base 127: mod_base = OTHER; note = uracil
  modified_base 142..143: mod_base = OTHER; note = uracil
  modified_base 145: mod_base = OTHER; note = uracil
  modified_base 149: mod_base = OTHER; note = uracil
  modified_base 151: mod_base = OTHER; note = uracil
  modified_base 179: mod_base = OTHER; note = uracil
  modified_base 187: mod_base = OTHER; note = uracil
  modified_base 193..194: mod_base = OTHER; note = uracil
  modified_base 200: mod_base = OTHER; note = uracil
  modified_base 207: mod_base = OTHER; note = uracil
  modified_base 209: mod_base = OTHER; note = uracil
  modified_base 217: mod_base = OTHER; note = uracil
  modified_base 222: mod_base = OTHER; note = uracil
  modified_base 224: mod_base = OTHER; note = uracil
  modified_base 229..230: mod_base = OTHER; note = uracil
  modified_base 238..239: mod_base = OTHER; note = uracil
  modified_base 242: mod_base = OTHER; note = uracil
  modified_base 256..257: mod_base = OTHER; note = uracil
  modified_base 270: mod_base = OTHER; note = uracil
  modified_base 272..273: mod_base = OTHER; note = uracil
  modified_base 277: mod_base = OTHER; note = uracil
  modified_base 282: mod_base = OTHER; note = uracil
  modified_base 293: mod_base = OTHER; note = uracil
  modified_base 296: mod_base = OTHER; note = uracil
  modified_base 300: mod_base = OTHER; note = uracil
  modified_base 8: mod_base = m5c
  modified_base 14: mod_base = m5c
  modified_base 39: mod_base = m5c
  modified_base 93: mod_base = m5c
  modified_base 165: mod_base = m5c
  modified_base 235: mod_base = m5c
  modified_base 258: mod_base = m5c
  modified_base 263: mod_base = m5c
  variation 128: note = CpG site, residue is C if methylated or T(=U) if unmethylated
  variation 170: note = CpG site, residue is C if methylated or T(=U) if unmethylated
tgttattcggtttcgtattttttttattgttaatagaacggaggagtgaggtttttaggaatggtttggaggttggtgaggtttgagagggtcggtgatttatttttgttgtattttttgattttatygaggtagattttgttataattttttttttagaaaatcggaaygatagtgttaggagtgtttgatttagaagtaggaattttagttaatttgtgtatttttttagaacgttttttagaagtgggaattttcggatcggggattattttatagggtagggagagggttgttttt

SEQ ID NO: 217 - DNA, 300 bp, synthetic construct
  source 1..300: mol_type = other DNA
  modified_base 15..17: mod_base = OTHER; note = uracil
  modified_base 20..21: mod_base = OTHER; note = uracil
  modified_base 31: mod_base = OTHER; note = uracil
  modified_base 34..35: mod_base = OTHER; note = uracil
  modified_base 42: mod_base = OTHER; note = uracil
  modified_base 48..50: mod_base = OTHER; note = uracil
  modified_base 59: mod_base = OTHER; note = uracil
  modified_base 61..64: mod_base = OTHER; note = uracil
  modified_base 66..68: mod_base = OTHER; note = uracil
  modified_base 70: mod_base = OTHER; note = uracil
  modified_base 72: mod_base = OTHER; note = uracil
  modified_base 75..76: mod_base = OTHER; note = uracil
  modified_base 78: mod_base = OTHER; note = uracil
  modified_base 80..81: mod_base = OTHER; note = uracil
  modified_base 85: mod_base = OTHER; note = uracil
  modified_base 87: mod_base = OTHER; note = uracil
  modified_base 89..90: mod_base = OTHER; note = uracil
  modified_base 97: mod_base = OTHER; note = uracil
  modified_base 100: mod_base = OTHER; note = uracil
  modified_base 103: mod_base = OTHER; note = uracil
  modified_base 106..107: mod_base = OTHER; note = uracil
  modified_base 109: mod_base = OTHER; note = uracil
  modified_base 119..120: mod_base = OTHER; note = uracil
  modified_base 128: mod_base = OTHER; note = uracil
  modified_base 131: mod_base = OTHER; note = uracil
  modified_base 136..138: mod_base = OTHER; note = uracil
  modified_base 143: mod_base = OTHER; note = uracil
  modified_base 150: mod_base = OTHER; note = uracil
  modified_base 159..160: mod_base = OTHER; note = uracil
  modified_base 165: mod_base = OTHER; note = uracil
  modified_base 172: mod_base = OTHER; note = uracil
  modified_base 181: mod_base = OTHER; note = uracil
  modified_base 185: mod_base = OTHER; note = uracil
  modified_base 189: mod_base = OTHER; note = uracil
  modified_base 193: mod_base = OTHER; note = uracil
  modified_base 195..197: mod_base = OTHER; note = uracil
  modified_base 199: mod_base = OTHER; note = uracil
  modified_base 206: mod_base = OTHER; note = uracil
  modified_base 230..231: mod_base = OTHER; note = uracil
  modified_base 236: mod_base = OTHER; note = uracil
  modified_base 239..241: mod_base = OTHER; note = uracil
  modified_base 245: mod_base = OTHER; note = uracil
  modified_base 247..250: mod_base = OTHER; note = uracil
  modified_base 252..254: mod_base = OTHER; note = uracil
  modified_base 257: mod_base = OTHER; note = uracil
  modified_base 262: mod_base = OTHER; note = uracil
  modified_base 265: mod_base = OTHER; note = uracil
  modified_base 267: mod_base = OTHER; note = uracil
  modified_base 269: mod_base = OTHER; note = uracil
  modified_base 272: mod_base = OTHER; note = uracil
  modified_base 274..277: mod_base = OTHER; note = uracil
  modified_base 280..282: mod_base = OTHER; note = uracil
  modified_base 285..286: mod_base = OTHER; note = uracil
  modified_base 288..289: mod_base = OTHER; note = uracil
  modified_base 293: mod_base = OTHER; note = uracil
  modified_base 295..297: mod_base = OTHER; note = uracil
  modified_base 91: mod_base = m5c
  modified_base 110: mod_base = m5c
  modified_base 161: mod_base = m5c
  modified_base 190: mod_base = m5c
  modified_base 216: mod_base = m5c
  modified_base 224: mod_base = m5c
  modified_base 233: mod_base = m5c
  variation 125: note = CpG site, residue is C if methylated or T(=U) if unmethylated
  variation 166: note = CpG site, residue is C if methylated or T(=U) if unmethylated
  variation 178: note = CpG site, residue is C if methylated or T(=U) if unmethylated
aagaaaagagaaagtttatttaggtaagggtagtttggtgattattattttggggagattttttatttatattgttattttaggtttattcgagggttgtagtttttttcggatggatttagggyggttattggttttagagttgggggttgagtgggttcgtgtygagggttgtggygtttgataagtcggtttttattgtgagtagggaagggcggatgggcgggggttacggttgttttggttttttattttgttgtgtttttttttatttttttgttttgttttttaatatttagt

SEQ ID NO: 218 - DNA, 300 bp, synthetic construct
  source 1..300: mol_type = other DNA
  modified_base 2: mod_base = OTHER; note = uracil
  modified_base 17: mod_base = OTHER; note = uracil
  modified_base 22: mod_base = OTHER; note = uracil
  modified_base 40: mod_base = OTHER; note = uracil
  modified_base 42: mod_base = OTHER; note = uracil
  modified_base 45: mod_base = OTHER; note = uracil
  modified_base 57..58: mod_base = OTHER; note = uracil
  modified_base 63: mod_base = OTHER; note = uracil
  modified_base 66: mod_base = OTHER; note = uracil
  modified_base 72..75: mod_base = OTHER; note = uracil
  modified_base 78..80: mod_base = OTHER; note = uracil
  modified_base 83: mod_base = OTHER; note = uracil
  modified_base 86..88: mod_base = OTHER; note = uracil
  modified_base 91..93: mod_base = OTHER; note = uracil
  modified_base 96: mod_base = OTHER; note = uracil
  modified_base 98: mod_base = OTHER; note = uracil
  modified_base 100: mod_base = OTHER; note = uracil
  modified_base 109: mod_base = OTHER; note = uracil
  modified_base 113: mod_base = OTHER; note = uracil
  modified_base 118: mod_base = OTHER; note = uracil
  modified_base 124..125: mod_base = OTHER; note = uracil
  modified_base 127: mod_base = OTHER; note = uracil
  modified_base 130..132: mod_base = OTHER; note = uracil
  modified_base 137: mod_base = OTHER; note = uracil
  modified_base 143..145: mod_base = OTHER; note = uracil
  modified_base 147: mod_base = OTHER; note = uracil
  modified_base 149: mod_base = OTHER; note = uracil
  modified_base 152..156: mod_base = OTHER; note = uracil
  modified_base 159: mod_base = OTHER; note = uracil
  modified_base 161: mod_base = OTHER; note = uracil
  modified_base 167..168: mod_base = OTHER; note = uracil
  modified_base 174: mod_base = OTHER; note = uracil
  modified_base 177..179: mod_base = OTHER; note = uracil
  modified_base 185..186: mod_base = OTHER; note = uracil
  modified_base 189: mod_base = OTHER; note = uracil
  modified_base 199: mod_base = OTHER; note = uracil
  modified_base 202: mod_base = OTHER; note = uracil
  modified_base 205..207: mod_base = OTHER; note = uracil
  modified_base 217..218: mod_base = OTHER; note = uracil
  modified_base 227: mod_base = OTHER; note = uracil
  modified_base 244: mod_base = OTHER; note = uracil
  modified_base 246..249: mod_base = OTHER; note = uracil
  modified_base 261: mod_base = OTHER; note = uracil
  modified_base 263..264: mod_base = OTHER; note = uracil
  modified_base 268: mod_base = OTHER; note = uracil
  modified_base 271..273: mod_base = OTHER; note = uracil
  modified_base 277..278: mod_base = OTHER; note = uracil
  modified_base 287: mod_base = OTHER; note = uracil
  modified_base 291: mod_base = OTHER; note = uracil
  modified_base 293: mod_base = OTHER; note = uracil
  modified_base 298: mod_base = OTHER; note = uracil
  modified_base 67: mod_base = m5c
  modified_base 76: mod_base = m5c
  modified_base 84: mod_base = m5c
  modified_base 110: mod_base = m5c
  modified_base 139: mod_base = m5c
  modified_base 190: mod_base = m5c
  modified_base 209: mod_base = m5c
  variation 122: note = CpG site, residue is C if methylated or T(=U) if unmethylated
  variation 134: note = CpG site, residue is C if methylated or T(=U) if unmethylated
  variation 175: note = CpG site, residue is C if methylated or T(=U) if unmethylated
attgggtgttaggaggtagggtaggggagtagagagaagtatagtagggtggggagttagggtagtcgtggttttcgtttattcgtttttttttgtttatagtgggagtcggtttgttagaygttatagttttyggtacgggtttatttagtttttagttttgggattagtagtygttttggatttattcggaggaagttgtagttttcgggtgagtttggagtggtagtgtgggtggggagtttttttagggtaatagttattaggttgtttttatttggatgggtttttttttttttt

SEQ ID NO: 219 - DNA, 300 bp, synthetic construct
  source 1..300: mol_type = other DNA
  modified_base 1: mod_base = OTHER; note = uracil
  modified_base 7: mod_base = OTHER; note = uracil
  modified_base 12: mod_base = OTHER; note = uracil
  modified_base 15: mod_base = OTHER; note = uracil
  modified_base 19: mod_base = OTHER; note = uracil
  modified_base 21: mod_base = OTHER; note = uracil
  modified_base 49: mod_base = OTHER; note = uracil
  modified_base 53: mod_base = OTHER; note = uracil
  modified_base 55: mod_base = OTHER; note = uracil
  modified_base 57..59: mod_base = OTHER; note = uracil
  modified_base 71: mod_base = OTHER; note = uracil
  modified_base 74: mod_base = OTHER; note = uracil
  modified_base 87..90: mod_base = OTHER; note = uracil
  modified_base 92: mod_base = OTHER; note = uracil
  modified_base 100: mod_base = OTHER; note = uracil
  modified_base 107: mod_base = OTHER; note = uracil
  modified_base 110..111: mod_base = OTHER; note = uracil
  modified_base 113: mod_base = OTHER; note = uracil
  modified_base 115: mod_base = OTHER; note = uracil
  modified_base 118: mod_base = OTHER; note = uracil
  modified_base 121..122: mod_base = OTHER; note = uracil
  modified_base 125: mod_base = OTHER; note = uracil
  modified_base 127: mod_base = OTHER; note = uracil
  modified_base 130: mod_base = OTHER; note = uracil
  modified_base 133..135: mod_base = OTHER; note = uracil
  modified_base 137..138: mod_base = OTHER; note = uracil
  modified_base 140: mod_base = OTHER; note = uracil
  modified_base 144: mod_base = OTHER; note = uracil
  modified_base 146: mod_base = OTHER; note = uracil
  modified_base 150: mod_base = OTHER; note = uracil
  modified_base 152: mod_base = OTHER; note = uracil
  modified_base 155: mod_base = OTHER; note = uracil
  modified_base 158: mod_base = OTHER; note = uracil
  modified_base 160: mod_base = OTHER; note = uracil
  modified_base 168: mod_base = OTHER; note = uracil
  modified_base 174..175: mod_base = OTHER; note = uracil
  modified_base 180: mod_base = OTHER; note = uracil
  modified_base 187: mod_base = OTHER; note = uracil
  modified_base 190: mod_base = OTHER; note = uracil
  modified_base 196: mod_base = OTHER; note = uracil
  modified_base 213: mod_base = OTHER; note = uracil
  modified_base 224: mod_base = OTHER; note = uracil
  modified_base 227: mod_base = OTHER; note = uracil
  modified_base 229: mod_base = OTHER; note = uracil
  modified_base 234: mod_base = OTHER; note = uracil
  modified_base 238..240: mod_base = OTHER; note = uracil
  modified_base 242..243: mod_base = OTHER; note = uracil
  modified_base 246: mod_base = OTHER; note = uracil
  modified_base 248: mod_base = OTHER; note = uracil
  modified_base 253: mod_base = OTHER; note = uracil
  modified_base 255: mod_base = OTHER; note = uracil
  modified_base 262..263: mod_base = OTHER; note = uracil
  modified_base 265: mod_base = OTHER; note = uracil
  modified_base 276: mod_base = OTHER; note = uracil
  modified_base 278: mod_base = OTHER; note = uracil
  modified_base 286..287: mod_base = OTHER; note = uracil
  modified_base 289: mod_base = OTHER; note = uracil
  modified_base 295: mod_base = OTHER; note = uracil
  modified_base 297: mod_base = OTHER; note = uracil
  modified_base 300: mod_base = OTHER; note = uracil
  modified_base 60: mod_base = m5c
  modified_base 141: mod_base = m5c
  modified_base 214: mod_base = m5c
  modified_base 219: mod_base = m5c
  modified_base 236: mod_base = m5c
  modified_base 251: mod_base = m5c
  modified_base 256: mod_base = m5c
  modified_base 268: mod_base = m5c
  variation 108: note = CpG site, residue is C if methylated or T(=U) if unmethylated
  variation 131: note = CpG site, residue is C if methylated or T(=U) if unmethylated
  variation 194: note = CpG site, residue is C if methylated or T(=U) if unmethylated
ttgaggtagggttgtaggtttaggaggaggagatgggtggagagagaataagtttatttcgggagggtgattataggagaaatgggttttttaagtatgttgattttygttttattgttgtttgttttttygtttattttcggttttggtttatttgtttttgtaagtagggttttgggttgggtgttgtaggygtatgaggaaagtgggagtcgggacggggtagtttagggtacgttttttaatattgcgtttcgaggattttagcggttttatttaggggtgttattgaggtatagt

SEQ ID NO: 220 - DNA, 300 bp, synthetic construct
  source 1..300: mol_type = other DNA
  modified_base 2: mod_base = OTHER; note = uracil
  modified_base 7..8: mod_base = OTHER; note = uracil
  modified_base 10: mod_base = OTHER; note = uracil
  modified_base 16: mod_base = OTHER; note = uracil
  modified_base 18..21: mod_base = OTHER; note = uracil
  modified_base 31: mod_base = OTHER; note = uracil
  modified_base 34: mod_base = OTHER; note = uracil
  modified_base 41..42: mod_base = OTHER; note = uracil
  modified_base 51: mod_base = OTHER; note = uracil
  modified_base 68..70: mod_base = OTHER; note = uracil
  modified_base 75: mod_base = OTHER; note = uracil
  modified_base 78..80: mod_base = OTHER; note = uracil
  modified_base 84..85: mod_base = OTHER; note = uracil
  modified_base 89: mod_base = OTHER; note = uracil
  modified_base 91..93: mod_base = OTHER; note = uracil
  modified_base 95: mod_base = OTHER; note = uracil
  modified_base 99..100: mod_base = OTHER; note = uracil
  modified_base 102: mod_base = OTHER; note = uracil
  modified_base 108..109: mod_base = OTHER; note = uracil
  modified_base 112: mod_base = OTHER; note = uracil
  modified_base 115: mod_base = OTHER; note = uracil
  modified_base 117..119: mod_base = OTHER; note = uracil
  modified_base 122..124: mod_base = OTHER; note = uracil
  modified_base 129..131: mod_base = OTHER; note = uracil
  modified_base 134: mod_base = OTHER; note = uracil
  modified_base 138: mod_base = OTHER; note = uracil
  modified_base 144: mod_base = OTHER; note = uracil
  modified_base 152..153: mod_base = OTHER; note = uracil
  modified_base 158: mod_base = OTHER; note = uracil
  modified_base 177: mod_base = OTHER; note = uracil
  modified_base 181: mod_base = OTHER; note = uracil
  modified_base 184: mod_base = OTHER; note = uracil
  modified_base 199: mod_base = OTHER; note = uracil
  modified_base 202: mod_base = OTHER; note = uracil
  modified_base 206: mod_base = OTHER; note = uracil
  modified_base 215..217: mod_base = OTHER; note = uracil
  modified_base 222: mod_base = OTHER; note = uracil
  modified_base 224..225: mod_base = OTHER; note = uracil
  modified_base 232: mod_base = OTHER; note = uracil
  modified_base 234..236: mod_base = OTHER; note = uracil
  modified_base 238..239: mod_base = OTHER; note = uracil
  modified_base 249: mod_base = OTHER; note = uracil
  modified_base 255: mod_base = OTHER; note = uracil
  modified_base 257: mod_base = OTHER; note = uracil
  modified_base 259: mod_base = OTHER; note = uracil
  modified_base 261..262: mod_base = OTHER; note = uracil
  modified_base 264..266: mod_base = OTHER; note = uracil
  modified_base 269: mod_base = OTHER; note = uracil
  modified_base 271..272: mod_base = OTHER; note = uracil
  modified_base 274..275: mod_base = OTHER; note = uracil
  modified_base 277..278: mod_base = OTHER; note = uracil
  modified_base 283..284: mod_base = OTHER; note = uracil
  modified_base 287: mod_base = OTHER; note = uracil
  modified_base 290..292: mod_base = OTHER; note = uracil
  modified_base 295..296: mod_base = OTHER; note = uracil
  modified_base 298: mod_base = OTHER; note = uracil
  modified_base 32: mod_base = m5c
  modified_base 44: mod_base = m5c
  modified_base 49: mod_base = m5c
  modified_base 64: mod_base = m5c
  modified_base 81: mod_base = m5c
  modified_base 86: mod_base = m5c
  modified_base 159: mod_base = m5c
  modified_base 240: mod_base = m5c
  variation 106: note = CpG site, residue is C if methylated or T(=U) if unmethylated
  variation 169: note = CpG site, residue is C if methylated or T(=U) if unmethylated
  variation 192: note = CpG site, residue is C if methylated or T(=U) if unmethylated
gttgtgttttagtggtatttttgagtaaaatcgttgaggttttcggagcgtagtgttggagggcgtgttttgagttgtttcgtttcggtttttattttttttatgygtttgtagtatttagtttaggattttgtttataagagtagatgagttagagtcggaggtgggyggaagagtaggtagtagtgaggyggaaattagtatatttgaggggtttattttttttgtagttattttttcggggtgagtttgttttttttttatttattttttttttttgagtttgtagttttgttttag

SEQ ID NO: 221 - DNA, 300 bp, synthetic construct
  source 1..300: mol_type = other DNA
  modified_base 2..4: mod_base = OTHER; note = uracil
  modified_base 8: mod_base = OTHER; note = uracil
  modified_base 16: mod_base = OTHER; note = uracil
  modified_base 28: mod_base = OTHER; note = uracil
  modified_base 33: mod_base = OTHER; note = uracil
  modified_base 35: mod_base = OTHER; note = uracil
  modified_base 37: mod_base = OTHER; note = uracil
  modified_base 40: mod_base = OTHER; note = uracil
  modified_base 43..44: mod_base = OTHER; note = uracil
  modified_base 46: mod_base = OTHER; note = uracil
  modified_base 49..50: mod_base = OTHER; note = uracil
  modified_base 52..53: mod_base = OTHER; note = uracil
  modified_base 60: mod_base = OTHER; note = uracil
  modified_base 69: mod_base = OTHER; note = uracil
  modified_base 71..72: mod_base = OTHER; note = uracil
  modified_base 75..76: mod_base = OTHER; note = uracil
  modified_base 78: mod_base = OTHER; note = uracil
  modified_base 81..82: mod_base = OTHER; note = uracil
  modified_base 84..86: mod_base = OTHER; note = uracil
  modified_base 92..93: mod_base = OTHER; note = uracil
  modified_base 102: mod_base = OTHER; note = uracil
  modified_base 113: mod_base = OTHER; note = uracil
  modified_base 115..116: mod_base = OTHER; note = uracil
  modified_base 120..122: mod_base = OTHER; note = uracil
  modified_base 125: mod_base = OTHER; note = uracil
  modified_base 153..154: mod_base = OTHER; note = uracil
  modified_base 163: mod_base = OTHER; note = uracil
  modified_base 167: mod_base = OTHER; note = uracil
  modified_base 172: mod_base = OTHER; note = uracil
  modified_base 178: mod_base = OTHER; note = uracil
  modified_base 180..181: mod_base = OTHER; note = uracil
  modified_base 185..186: mod_base = OTHER; note = uracil
  modified_base 188: mod_base = OTHER; note = uracil
  modified_base 196: mod_base = OTHER; note = uracil
  modified_base 198: mod_base = OTHER; note = uracil
  modified_base 202..203: mod_base = OTHER; note = uracil
  modified_base 205: mod_base = OTHER; note = uracil
  modified_base 208..212: mod_base = OTHER; note = uracil
  modified_base 219: mod_base = OTHER; note = uracil
  modified_base 232: mod_base = OTHER; note = uracil
  modified_base 238..239: mod_base = OTHER; note = uracil
  modified_base 241: mod_base = OTHER; note = uracil
  modified_base 244: mod_base = OTHER; note = uracil
  modified_base 246..247: mod_base = OTHER; note = uracil
  modified_base 251..252: mod_base = OTHER; note = uracil
  modified_base 254: mod_base = OTHER; note = uracil
  modified_base 257: mod_base = OTHER; note = uracil
  modified_base 263: mod_base = OTHER; note = uracil
  modified_base 266..267: mod_base = OTHER; note = uracil
  modified_base 275: mod_base = OTHER; note = uracil
  modified_base 278..280: mod_base = OTHER; note = uracil
  modified_base 282: mod_base = OTHER; note = uracil
  modified_base 285..286: mod_base = OTHER; note = uracil
  modified_base 290: mod_base = OTHER; note = uracil
  modified_base 294: mod_base = OTHER; note = uracil
  modified_base 297: mod_base = OTHER; note = uracil
  modified_base 22: mod_base = m5c
  modified_base 54: mod_base = m5c
  modified_base 64: mod_base = m5c
  modified_base 199: mod_base = m5c
  modified_base 248: mod_base = m5c
  variation 150: note = CpG site, residue is C if methylated or T(=U) if unmethylated
gtttaggttggagtgtagtggcgtgattttggtttattgtaatttttgtttttcgggtttaagcgatttttttgttttagttttttagatatttgggattataggtgtgtgatattatatttagttaatttttgtatttttagtagagayggttatgttagttaggttggttttgaatttttgattttagtgatttatcggttttagtttttaaagtgttggtattatagttatgagttattgtattcggtttttgtttttgtttttttagtggtattttattgttttgtttttaatatt

SEQ ID NO: 222 - DNA, 300 bp, synthetic construct
  source 1..300: mol_type = other DNA
  modified_base 12: mod_base = OTHER; note = uracil
  modified_base 17: mod_base = OTHER; note = uracil
  modified_base 27..28: mod_base = OTHER; note = uracil
  modified_base 30: mod_base = OTHER; note = uracil
  modified_base 39: mod_base = OTHER; note = uracil
  modified_base 45: mod_base = OTHER; note = uracil
  modified_base 51: mod_base = OTHER; note = uracil
  modified_base 58: mod_base = OTHER; note = uracil
  modified_base 64: mod_base = OTHER; note = uracil
  modified_base 66: mod_base = OTHER; note = uracil
  modified_base 71: mod_base = OTHER; note = uracil
  modified_base 79..80: mod_base = OTHER; note = uracil
  modified_base 83: mod_base = OTHER; note = uracil
  modified_base 85: mod_base = OTHER; note = uracil
  modified_base 94: mod_base = OTHER; note = uracil
  modified_base 100: mod_base = OTHER; note = uracil
  modified_base 109: mod_base = OTHER; note = uracil
  modified_base 111: mod_base = OTHER; note = uracil
  modified_base 118: mod_base = OTHER; note = uracil
  modified_base 126: mod_base = OTHER; note = uracil
  modified_base 131..132: mod_base = OTHER; note = uracil
  modified_base 135..136: mod_base = OTHER; note = uracil
  modified_base 140: mod_base = OTHER; note = uracil
  modified_base 144: mod_base = OTHER; note = uracil
  modified_base 149: mod_base = OTHER; note = uracil
  modified_base 153: mod_base = OTHER; note = uracil
  modified_base 155: mod_base = OTHER; note = uracil
  modified_base 158: mod_base = OTHER; note = uracil
  modified_base 167: mod_base = OTHER; note = uracil
  modified_base 177: mod_base = OTHER; note = uracil
  modified_base 190: mod_base = OTHER; note = uracil
  modified_base 192: mod_base = OTHER; note = uracil
  modified_base 194: mod_base = OTHER; note = uracil
  modified_base 196..197: mod_base = OTHER; note = uracil
  modified_base 204..206: mod_base = OTHER; note = uracil
  modified_base 213: mod_base = OTHER; note = uracil
  modified_base 221: mod_base = OTHER; note = uracil
  modified_base 227: mod_base = OTHER; note = uracil
  modified_base 238: mod_base = OTHER; note = uracil
  modified_base 244..245: mod_base = OTHER; note = uracil
  modified_base 253: mod_base = OTHER; note = uracil
  modified_base 262: mod_base = OTHER; note = uracil
  modified_base 269..270: mod_base = OTHER; note = uracil
  modified_base 276: mod_base = OTHER; note = uracil
  modified_base 280..281: mod_base = OTHER; note = uracil
  modified_base 283: mod_base = OTHER; note = uracil
  modified_base 286: mod_base = OTHER; note = uracil
  modified_base 288: mod_base = OTHER; note = uracil
  modified_base 290..291: mod_base = OTHER; note = uracil
  modified_base 294..295: mod_base = OTHER; note = uracil
  modified_base 300: mod_base = OTHER; note = uracil
  modified_base 52: mod_base = m5c
  modified_base 101: mod_base = m5c
  modified_base 236: mod_base = m5c
  modified_base 246: mod_base = m5c
  modified_base 278: mod_base = m5c
  variation 150: note = CpG site, residue is C if methylated or T(=U) if unmethylated
aatgttgaaagtaaggtagtgggatgttattaaggaagtaaaagtagaggtcgggtgtagtggtttatgattataatattagtattttgggggttgaggtcggtgaattattgaggttaggagtttaagattagtttgattaatatggtygtttttattaaaaatataaaaattagttgggtatggtgttatatatttgtaattttaggtatttgggaggttgaggtaggagaatcgtttgaattcgggaggtagaggttgtagtgagttaagattacgttattgtattttagtttgggt

SEQ ID NO: 223 - DNA, 300 bp, synthetic construct
  source 1..300: mol_type = other DNA
  modified_base 2..3: mod_base = OTHER; note = uracil
  modified_base 5: mod_base = OTHER; note = uracil
  modified_base 7: mod_base = OTHER; note = uracil
  modified_base 23: mod_base = OTHER; note = uracil
  modified_base 28: mod_base = OTHER; note = uracil
  modified_base 36: mod_base = OTHER; note = uracil
  modified_base 43: mod_base = OTHER; note = uracil
  modified_base 48: mod_base = OTHER; note = uracil
  modified_base 56..58: mod_base = OTHER; note = uracil
  modified_base 63: mod_base = OTHER; note = uracil
  modified_base 86..87: mod_base = OTHER; note = uracil
  modified_base 92: mod_base = OTHER; note = uracil
  modified_base 96..97: mod_base = OTHER; note = uracil
  modified_base 103: mod_base = OTHER; note = uracil
  modified_base 105..107: mod_base = OTHER; note = uracil
  modified_base 109..110: mod_base = OTHER; note = uracil
  modified_base 112..115: mod_base = OTHER; note = uracil
  modified_base 129: mod_base = OTHER; note = uracil
  modified_base 135: mod_base = OTHER; note = uracil
  modified_base 137..138: mod_base = OTHER; note = uracil
  modified_base 143: mod_base = OTHER; note = uracil
  modified_base 146..147: mod_base = OTHER; note = uracil
  modified_base 149: mod_base = OTHER; note = uracil
  modified_base 152..154: mod_base = OTHER; note = uracil
  modified_base 156: mod_base = OTHER; note = uracil
  modified_base 158: mod_base = OTHER; note = uracil
  modified_base 160: mod_base = OTHER; note = uracil
  modified_base 171..172: mod_base = OTHER; note = uracil
  modified_base 181: mod_base = OTHER; note = uracil
  modified_base 184: mod_base = OTHER; note = uracil
  modified_base 187..188: mod_base = OTHER; note = uracil
  modified_base 190..192: mod_base = OTHER; note = uracil
  modified_base 196: mod_base = OTHER; note = uracil
  modified_base 202: mod_base = OTHER; note = uracil
  modified_base 206..208: mod_base = OTHER; note = uracil
  modified_base 213: mod_base = OTHER; note = uracil
  modified_base 220: mod_base = OTHER; note = uracil
  modified_base 226: mod_base = OTHER; note = uracil
  modified_base 228: mod_base = OTHER; note = uracil
  modified_base 234..237: mod_base = OTHER; note = uracil
  modified_base 251: mod_base = OTHER; note = uracil
  modified_base 265: mod_base = OTHER; note = uracil
  modified_base 270: mod_base = OTHER; note = uracil
  modified_base 277: mod_base = OTHER; note = uracil
  modified_base 296..297: mod_base = OTHER; note = uracil
  modified_base 300: mod_base = OTHER; note = uracil
  modified_base 30: mod_base = m5c
  modified_base 45: mod_base = m5c
  modified_base 76: mod_base = m5c
  modified_base 116: mod_base = m5c
  modified_base 173: mod_base = m5c
  modified_base 182: mod_base = m5c
  variation 150: note = CpG site, residue is C if methylated or T(=U) if unmethylated
gttattttataaaaatgaagagtagagttcgagtgtttataatacgttatttttatttaagatagagaagaaaaacgaaagagagtttgagtatttttttgattttttttattttcggaaggtatatttagagtttttaagattgttttygtttatttatatgtttatggttcggtgagatcgtattttttttttttatatttgttttttttttggatgtagggatatagaattttttaagtgggaagagttttggagtggaggttgtttaaagttttgtggtgattaattattatttat

SEQ ID NO: 224 - DNA, 300 bp, synthetic construct
  source 1..300: mol_type = other DNA
  modified_base 16: mod_base = OTHER; note = uracil
  modified_base 18..19: mod_base = OTHER; note = uracil
  modified_base 21: mod_base = OTHER; note = uracil
  modified_base 26: mod_base = OTHER; note = uracil
  modified_base 33: mod_base = OTHER; note = uracil
  modified_base 36..37: mod_base = OTHER; note = uracil
  modified_base 39..40: mod_base = OTHER; note = uracil
  modified_base 42: mod_base = OTHER; note = uracil
  modified_base 44..45: mod_base = OTHER; note = uracil
  modified_base 50: mod_base = OTHER; note = uracil
  modified_base 52: mod_base = OTHER; note = uracil
  modified_base 55..57: mod_base = OTHER; note = uracil
  modified_base 59: mod_base = OTHER; note = uracil
  modified_base 70: mod_base = OTHER; note = uracil
  modified_base 76..78: mod_base = OTHER; note = uracil
  modified_base 81: mod_base = OTHER; note = uracil
  modified_base 84..85: mod_base = OTHER; note = uracil
  modified_base 96: mod_base = OTHER; note = uracil
  modified_base 121: mod_base = OTHER; note = uracil
  modified_base 123: mod_base = OTHER; note = uracil
  modified_base 125: mod_base = OTHER; note = uracil
  modified_base 130..131: mod_base = OTHER; note = uracil
  modified_base 137: mod_base = OTHER; note = uracil
  modified_base 155: mod_base = OTHER; note = uracil
  modified_base 159: mod_base = OTHER; note = uracil
  modified_base 167: mod_base = OTHER; note = uracil
  modified_base 169: mod_base = OTHER; note = uracil
  modified_base 178..179: mod_base = OTHER; note = uracil
  modified_base 182: mod_base = OTHER; note = uracil
  modified_base 199: mod_base = OTHER; note = uracil
  modified_base 209: mod_base = OTHER; note = uracil
  modified_base 211: mod_base = OTHER; note = uracil
  modified_base 215: mod_base = OTHER; note = uracil
  modified_base 217: mod_base = OTHER; note = uracil
  modified_base 219: mod_base = OTHER; note = uracil
  modified_base 230: mod_base = OTHER; note = uracil
  modified_base 233: mod_base = OTHER; note = uracil
  modified_base 235: mod_base = OTHER; note = uracil
  modified_base 239: mod_base = OTHER; note = uracil
  modified_base 265: mod_base = OTHER; note = uracil
  modified_base 267: mod_base = OTHER; note = uracil
  modified_base 273: mod_base = OTHER; note = uracil
  modified_base 275: mod_base = OTHER; note = uracil
  modified_base 278: mod_base = OTHER; note = uracil
  modified_base 280: mod_base = OTHER; note = uracil
  modified_base 283: mod_base = OTHER; note = uracil
  modified_base 299: mod_base = OTHER; note = uracil
  modified_base 117: mod_base = m5c
  modified_base 126: mod_base = m5c
  modified_base 183: mod_base = m5c
  modified_base 223: mod_base = m5c
  modified_base 254: mod_base = m5c
  modified_base 269: mod_base = m5c
  variation 149: note = CpG site, residue is C if methylated or T(=U) if unmethylated
taggtaataattaattattatagaattttgaatagtttttattttaaagttttttttatttaggggattttgtgtttttgtatttagaaaagggatagatatagaaagggaggatgcggttttatcgggttataaatatgtgagtgggyggaggtagttttggagattttgaatatatttttcgggggtggagggagttaaaggaatgtttaggttttttttcgttttttttttttgttttgggtaaaaatgacgtgttataagtattcgagttttgttttttatttttatagagtggtt

SEQ ID NO: 225 - DNA, 300 bp, synthetic construct
  source 1..300: mol_type = other DNA
  modified_base 8: mod_base = OTHER; note = uracil
  modified_base 11: mod_base = OTHER; note = uracil
  modified_base 15: mod_base = OTHER; note = uracil
  modified_base 17..18: mod_base = OTHER; note = uracil
  modified_base 22..24: mod_base = OTHER; note = uracil
  modified_base 36: mod_base = OTHER; note = uracil
  modified_base 40: mod_base = OTHER; note = uracil
  modified_base 42: mod_base = OTHER; note = uracil
  modified_base 54: mod_base = OTHER; note = uracil
  modified_base 62..63: mod_base = OTHER; note = uracil
  modified_base 70..71: mod_base = OTHER; note = uracil
  modified_base 75..76: mod_base = OTHER; note = uracil
  modified_base 83: mod_base = OTHER; note = uracil
  modified_base 87: mod_base = OTHER; note = uracil
  modified_base 92: mod_base = OTHER; note = uracil
  modified_base 96: mod_base = OTHER; note = uracil
  modified_base 107: mod_base = OTHER; note = uracil
  modified_base 125: mod_base = OTHER; note = uracil
  modified_base 142: mod_base = OTHER; note = uracil
  modified_base 144: mod_base = OTHER; note = uracil
  modified_base 157: mod_base = OTHER; note = uracil
  modified_base 166: mod_base = OTHER; note = uracil
  modified_base 177: mod_base = OTHER; note = uracil
  modified_base 186: mod_base = OTHER; note = uracil
  modified_base 189..193: mod_base = OTHER; note = uracil
  modified_base 195..198: mod_base = OTHER; note = uracil
  modified_base 200: mod_base = OTHER; note = uracil
  modified_base 203: mod_base = OTHER; note = uracil
  modified_base 215: mod_base = OTHER; note = uracil
  modified_base 217: mod_base = OTHER; note = uracil
  modified_base 222: mod_base = OTHER; note = uracil
  modified_base 226..227: mod_base = OTHER; note = uracil
  modified_base 231: mod_base = OTHER; note = uracil
  modified_base 245..247: mod_base = OTHER; note = uracil
  modified_base 255..258: mod_base = OTHER; note = uracil
  modified_base 264..265: mod_base = OTHER; note = uracil
  modified_base 271..272: mod_base = OTHER; note = uracil
  modified_base 275: mod_base = OTHER; note = uracil
  modified_base 277: mod_base = OTHER; note = uracil
  modified_base 283: mod_base = OTHER; note = uracil
  modified_base 288: mod_base = OTHER; note = uracil
  modified_base 290: mod_base = OTHER; note = uracil
  modified_base 296: mod_base = OTHER; note = uracil
  modified_base 81: mod_base = m5c
  modified_base 100: mod_base = m5c
  modified_base 108: mod_base = m5c
  modified_base 178: mod_base = m5c
  modified_base 268: mod_base = m5c
  variation 151: note = CpG site, residue is C if methylated or T(=U) if unmethylated
attaaaatagtaaattttaggtttaaagtaggttttagtttttattaagataataaaaggttttaaatgttaggtttgggcgtaaattgtgtagataagcgggtggtcggagaaggaggggggttaaggaagagagggaaatttaattgayggttattttttttttagagttattttcggtgggtttgtttttattttttaataaattttgttgttttgagtattttaggtataaaaagtgaggttttggagggtttttgagattagcgttttgtatagtgatatggtatagtgatatgg

SEQ ID NO: 226 - DNA, 300 bp, synthetic construct
  source 1..300: mol_type = other DNA
  modified_base 1..2: mod_base = OTHER; note = uracil
  modified_base 7: mod_base = OTHER; note = uracil
  modified_base 9: mod_base = OTHER; note = uracil
  modified_base 14..15: mod_base = OTHER; note = uracil
  modified_base 20: mod_base = OTHER; note = uracil
  modified_base 22: mod_base = OTHER; note = uracil
  modified_base 27: mod_base = OTHER; note = uracil
  modified_base 34: mod_base = OTHER; note = uracil
  modified_base 39: mod_base = OTHER; note = uracil
  modified_base 41: mod_base = OTHER; note = uracil
  modified_base 47..49: mod_base = OTHER; note = uracil
  modified_base 51..52: mod_base = OTHER; note = uracil
  modified_base 57..58: mod_base = OTHER; note = uracil
  modified_base 60: mod_base = OTHER; note = uracil
  modified_base 62: mod_base = OTHER; note = uracil
  modified_base 71..72: mod_base = OTHER; note = uracil
  modified_base 80: mod_base = OTHER; note = uracil
  modified_base 82: mod_base = OTHER; note = uracil
  modified_base 87: mod_base = OTHER; note = uracil
  modified_base 90: mod_base = OTHER; note = uracil
  modified_base 113: mod_base = OTHER; note = uracil
  modified_base 117..119: mod_base = OTHER; note = uracil
  modified_base 121: mod_base = OTHER; note = uracil
  modified_base 131: mod_base = OTHER; note = uracil
  modified_base 133: mod_base = OTHER; note = uracil
  modified_base 148: mod_base = OTHER; note = uracil
  modified_base 152: mod_base = OTHER; note = uracil
  modified_base 163..165: mod_base = OTHER; note = uracil
  modified_base 167: mod_base = OTHER; note = uracil
  modified_base 169: mod_base = OTHER; note = uracil
  modified_base 172..173: mod_base = OTHER; note = uracil
  modified_base 178..183: mod_base = OTHER; note = uracil
  modified_base 185..186: mod_base = OTHER; note = uracil
  modified_base 189: mod_base = OTHER; note = uracil
  modified_base 191: mod_base = OTHER; note = uracil
  modified_base 195..196: mod_base = OTHER; note = uracil
  modified_base 198..199: mod_base = OTHER; note = uracil
  modified_base 202: mod_base = OTHER; note = uracil
  modified_base 207: mod_base = OTHER; note = uracil
  modified_base 210: mod_base = OTHER; note = uracil
  modified_base 212: mod_base = OTHER; note = uracil
  modified_base 221..223: mod_base = OTHER; note = uracil
  modified_base 227..228: mod_base = OTHER; note = uracil
  modified_base 232: mod_base = OTHER; note = uracil
  modified_base 241..242: mod_base = OTHER; note = uracil
  modified_base 252: mod_base = OTHER; note = uracil
  modified_base 263: mod_base = OTHER; note = uracil
  modified_base 269..270: mod_base = OTHER; note = uracil
  modified_base 273: mod_base = OTHER; note = uracil
  modified_base 280..281: mod_base = OTHER; note = uracil
  modified_base 291: mod_base = OTHER; note = uracil
  modified_base 32: mod_base = m5c
  modified_base 122: mod_base = m5c
  modified_base 192: mod_base = m5c
  modified_base 200: mod_base = m5c
  modified_base 219: mod_base = m5c
  variation 149: note = CpG site, residue is C if methylated or T(=U) if unmethylated
ttatgttattgtgttatgttattgtgtaggacgttggttttaggggttttttagggttttattttttatgtttggaatgtttagagtaataaaatttgttgaggggtgggggtagatttatcggaaataattttgaaaaaaaagtaatygttaattgagttttttttttttttttgattttttttttttttcggttattcgtttgtttgtatagtttgcgtttaggtttggtatttaggattttttgttattttaatagagattgaaatttattttgggtttggagtttgttgttttaat

SEQ ID NO: 227 - DNA, 300 bp, synthetic construct
  source 1..300: mol_type = other DNA
  modified_base 3: mod_base = OTHER; note = uracil
  modified_base 5: mod_base = OTHER; note = uracil
  modified_base 14: mod_base = OTHER; note = uracil
  modified_base 20..21: mod_base = OTHER; note = uracil
  modified_base 24: mod_base = OTHER; note = uracil
  modified_base 35: mod_base = OTHER; note = uracil
  modified_base 38..41: mod_base = OTHER; note = uracil
  modified_base 43..44: mod_base = OTHER; note = uracil
  modified_base 51..52: mod_base = OTHER; note = uracil
  modified_base 56: mod_base = OTHER; note = uracil
  modified_base 65: mod_base = OTHER; note = uracil
  modified_base 68: mod_base = OTHER; note = uracil
  modified_base 70: mod_base = OTHER; note = uracil
  modified_base 72: mod_base = OTHER; note = uracil
  modified_base 82: mod_base = OTHER; note = uracil
  modified_base 85..87: mod_base = OTHER; note = uracil
  modified_base 90: mod_base = OTHER; note = uracil
  modified_base 110: mod_base = OTHER; note = uracil
  modified_base 114: mod_base = OTHER; note = uracil
  modified_base 117..119: mod_base = OTHER; note = uracil
  modified_base 121: mod_base = OTHER; note = uracil
  modified_base 136: mod_base = OTHER; note = uracil
  modified_base 138..139: mod_base = OTHER; note = uracil
  modified_base 147..148: mod_base = OTHER; note = uracil
  modified_base 151: mod_base = OTHER; note = uracil
  modified_base 161: mod_base = OTHER; note = uracil
  modified_base 164: mod_base = OTHER; note = uracil
  modified_base 175: mod_base = OTHER; note = uracil
  modified_base 178..180: mod_base = OTHER; note = uracil
  modified_base 185: mod_base = OTHER; note = uracil
  modified_base 190: mod_base = OTHER; note = uracil
  modified_base 193: mod_base = OTHER; note = uracil
  modified_base 196: mod_base = OTHER; note = uracil
  modified_base 198: mod_base = OTHER; note = uracil
  modified_base 201..202: mod_base = OTHER; note = uracil
  modified_base 204..205: mod_base = OTHER; note = uracil
  modified_base 207: mod_base = OTHER; note = uracil
  modified_base 211..212: mod_base = OTHER; note = uracil
  modified_base 214: mod_base = OTHER; note = uracil
  modified_base 216..217: mod_base = OTHER; note = uracil
  modified_base 220: mod_base = OTHER; note = uracil
  modified_base 223: mod_base = OTHER; note = uracil
  modified_base 226..228: mod_base = OTHER; note = uracil
  modified_base 230: mod_base = OTHER; note = uracil
  modified_base 236: mod_base = OTHER; note = uracil
  modified_base 240..242: mod_base = OTHER; note = uracil
  modified_base 248: mod_base = OTHER; note = uracil
  modified_base 253..254: mod_base = OTHER; note = uracil
  modified_base 257: mod_base = OTHER; note = uracil
  modified_base 259: mod_base = OTHER; note = uracil
  modified_base 263: mod_base = OTHER; note = uracil
  modified_base 265: mod_base = OTHER; note = uracil
  modified_base 267..268: mod_base = OTHER; note = uracil
  modified_base 273..274: mod_base = OTHER; note = uracil
  modified_base 277: mod_base = OTHER; note = uracil
  modified_base 279..280: mod_base = OTHER; note = uracil
  modified_base 298: mod_base = OTHER; note = uracil
  modified_base 25: mod_base = m5c
  modified_base 29: mod_base = m5c
  modified_base 57: mod_base = m5c
  modified_base 79: mod_base = m5c
  modified_base 126: mod_base = m5c
  modified_base 140: mod_base = m5c
  modified_base 188: mod_base = m5c
  modified_base 218: mod_base = m5c
  modified_base 231: mod_base = m5c
  modified_base 260: mod_base = m5c
  modified_base 270: mod_base = m5c
  modified_base 286: mod_base = m5c
  variation 149: note = CpG site, residue is C if methylated or T(=U) if unmethylated
ggttttgagagtgttggaattaatcggacggggttagttttattatgggatttggtcgatgagttatttttttgaaggcgtttttttttttgtgaagtggggaaggtaattgttattttatagggcgattgtgggtattcgggagattygttgagggatgttgtagtgtagaagttttttaaatttacgttgtttttttttttttttagttttttttcgttgttgtttttcggtttatgttttgtggttgatttattatcggttttttacggtttttattttgggcgggttggatggttg

SEQ ID NO: 228 - DNA, 300 bp, synthetic construct
  source 1..300: mol_type = other DNA
  modified_base 3..4: mod_base = OTHER; note = uracil
  modified_base 7..8: mod_base = OTHER; note = uracil
  modified_base 11..12: mod_base = OTHER; note = uracil
  modified_base 15..17: mod_base = OTHER; note = uracil
  modified_base 28: mod_base = OTHER; note = uracil
  modified_base 38: mod_base = OTHER; note = uracil
  modified_base 50: mod_base = OTHER; note = uracil
  modified_base 53..54: mod_base = OTHER; note = uracil
  modified_base 56: mod_base = OTHER; note = uracil
  modified_base 61: mod_base = OTHER; note = uracil
  modified_base 67: mod_base = OTHER; note = uracil
  modified_base 75: mod_base = OTHER; note = uracil
  modified_base 78: mod_base = OTHER; note = uracil
  modified_base 91: mod_base = OTHER; note = uracil
  modified_base 108: mod_base = OTHER; note = uracil
  modified_base 126: mod_base = OTHER; note = uracil
  modified_base 129: mod_base = OTHER; note = uracil
  modified_base 132: mod_base = OTHER; note = uracil
  modified_base 134: mod_base = OTHER; note = uracil
  modified_base 137: mod_base = OTHER; note = uracil
  modified_base 140: mod_base = OTHER; note = uracil
  modified_base 143..145: mod_base = OTHER; note = uracil
  modified_base 147: mod_base = OTHER; note = uracil
  modified_base 155: mod_base = OTHER; note = uracil
  modified_base 157..158: mod_base = OTHER; note = uracil
  modified_base 165..167: mod_base = OTHER; note = uracil
  modified_base 169: mod_base = OTHER; note = uracil
  modified_base 175..177: mod_base = OTHER; note = uracil
  modified_base 188: mod_base = OTHER; note = uracil
  modified_base 194..195: mod_base = OTHER; note = uracil
  modified_base 198..201: mod_base = OTHER; note = uracil
  modified_base 203: mod_base = OTHER; note = uracil
  modified_base 206: mod_base = OTHER; note = uracil
  modified_base 208: mod_base = OTHER; note = uracil
  modified_base 222..223: mod_base = OTHER; note = uracil
  modified_base 226: mod_base = OTHER; note = uracil
  modified_base 237: mod_base = OTHER; note = uracil
  modified_base 239: mod_base = OTHER; note = uracil
  modified_base 245..246: mod_base = OTHER; note = uracil
  modified_base 251..253: mod_base = OTHER; note = uracil
  modified_base 263: mod_base = OTHER; note = uracil
  modified_base 267..269: mod_base = OTHER; note = uracil
  modified_base 273: mod_base = OTHER; note = uracil
  modified_base 283..284: mod_base = OTHER; note = uracil
  modified_base 287: mod_base = OTHER; note = uracil
  modified_base 289: mod_base = OTHER; note = uracil
  modified_base 291: mod_base = OTHER; note = uracil
  modified_base 293: mod_base = OTHER; note = uracil
  modified_base 298..300: mod_base = OTHER; note = uracil
  modified_base 13: mod_base = m5c
  modified_base 29: mod_base = m5c
  modified_base 39: mod_base = m5c
  modified_base 68: mod_base = m5c
  modified_base 81: mod_base = m5c
  modified_base 111: mod_base = m5c
  modified_base 159: mod_base = m5c
  modified_base 173: mod_base = m5c
  modified_base 220: mod_base = m5c
  modified_base 242: mod_base = m5c
  modified_base 270: mod_base = m5c
  modified_base 274: mod_base = m5c
  variation 150: note = CpG site, residue is C if methylated or T(=U) if unmethylated
agttatttaattcgtttaaggtgaaggtcgtggagagtcggtgatggattagttatagggtatgaatcggagggtagtagcgggagaggattgaggaggaagagaagtagcgtagatttgggaagtttttatattgtagtattttttagygggtttttcgggtgtttataatcgttttgtgggatgatagttattttttttattttatagaagggaagacgtttttagagagatgatttatcggttaggttttatggtggggttgatttcgttcggttggttttagtatttttagagttt

SEQ ID NO: 229 - DNA, 300 bp, synthetic construct
  source 1..300: mol_type = other DNA
  modified_base 2: mod_base = OTHER; note = uracil
  modified_base 5: mod_base = OTHER; note = uracil
  modified_base 8: mod_base = OTHER; note = uracil
  modified_base 13..14: mod_base = OTHER; note = uracil
  modified_base 18: mod_base = OTHER; note = uracil
  modified_base 22..24: mod_base = OTHER; note = uracil
  modified_base 27..28: mod_base = OTHER; note = uracil
  modified_base 37: mod_base = OTHER; note = uracil
  modified_base 42: mod_base = OTHER; note = uracil
  modified_base 46..47: mod_base = OTHER; note = uracil
  modified_base 49: mod_base = OTHER; note = uracil
  modified_base 52..53: mod_base = OTHER; note = uracil
  modified_base 55..56: mod_base = OTHER; note = uracil
  modified_base 59: mod_base = OTHER; note = uracil
  modified_base 67: mod_base = OTHER; note = uracil
  modified_base 71: mod_base = OTHER; note = uracil
  modified_base 74..76: mod_base = OTHER; note = uracil
  modified_base 82..83: mod_base = OTHER; note = uracil
  modified_base 85..86: mod_base = OTHER; note = uracil
  modified_base 90..91: mod_base = OTHER; note = uracil
  modified_base 93: mod_base = OTHER; note = uracil
  modified_base 98..100: mod_base = OTHER; note = uracil
  modified_base 102: mod_base = OTHER; note = uracil
  modified_base 107..109: mod_base = OTHER; note = uracil
  modified_base 114..116: mod_base = OTHER; note = uracil
  modified_base 119..121: mod_base = OTHER; note = uracil
  modified_base 125: mod_base = OTHER; note = uracil
  modified_base 128: mod_base = OTHER; note = uracil
  modified_base 133..134: mod_base = OTHER; note = uracil
  modified_base 137: mod_base = OTHER; note = uracil
  modified_base 142..146: mod_base = OTHER; note = uracil
  modified_base 156: mod_base = OTHER; note = uracil
  modified_base 159..160: mod_base = OTHER; note = uracil
  modified_base 164..166: mod_base = OTHER; note = uracil
  modified_base 172..175: mod_base = OTHER; note = uracil
  modified_base 181: mod_base = OTHER; note = uracil
  modified_base 186: mod_base = OTHER; note = uracil
  modified_base 193: mod_base = OTHER; note = uracil
  modified_base 221: mod_base = OTHER; note = uracil
  modified_base 225: mod_base = OTHER; note = uracil
  modified_base 231..233: mod_base = OTHER; note = uracil
  modified_base 239: mod_base = OTHER; note = uracil
  modified_base 244: mod_base = OTHER; note = uracil
  modified_base 253: mod_base = OTHER; note = uracil
  modified_base 256..257: mod_base = OTHER; note = uracil
  modified_base 262..263: mod_base = OTHER; note = uracil
  modified_base 271: mod_base = OTHER; note = uracil
  modified_base 275: mod_base = OTHER; note = uracil
  modified_base 279..281: mod_base = OTHER; note = uracil
  modified_base 283..284: mod_base = OTHER; note = uracil
  modified_base 286: mod_base = OTHER; note = uracil
  modified_base 291..292: mod_base = OTHER; note = uracil
  modified_base 297: mod_base = OTHER; note = uracil
  modified_base 3: mod_base = m5c
  modified_base 6: mod_base = m5c
  modified_base 29: mod_base = m5c
  modified_base 40: mod_base = m5c
  modified_base 57: mod_base = m5c
  modified_base 65: mod_base = m5c
  modified_base 72: mod_base = m5c
  modified_base 79: mod_base = m5c
  modified_base 87: mod_base = m5c
  modified_base 96: mod_base = m5c
  modified_base 110: mod_base = m5c
  modified_base 117: mod_base = m5c
  modified_base 126: mod_base = m5c
  modified_base 135: mod_base = m5c
  modified_base 147: mod_base = m5c
  modified_base 169: mod_base = m5c
  modified_base 176: mod_base = m5c
  modified_base 184: mod_base = m5c
  modified_base 195: mod_base = m5c
  modified_base 197: mod_base = m5c
  modified_base 212: mod_base = m5c
  modified_base 214: mod_base = m5c
  modified_base 216: mod_base = m5c
  modified_base 219: mod_base = m5c
  modified_base 226: mod_base = m5c
  modified_base 237: mod_base = m5c
  modified_base 240: mod_base = m5c
  modified_base 246: mod_base = m5c
  modified_base 248: mod_base = m5c
  modified_base 272: mod_base = m5c
  modified_base 276: mod_base = m5c
  variation 151: note = CpG site, residue is C if methylated or T(=U) if unmethylated
gtcgtcgtttttttagttttgtttaattcggtatttttgcgtttgttttagttattcgtaggagcgtaggtcgtttttcgttttttcgttttttgcgtttataggatttcgggtttcgtttagttcgtaggtttcgtaggttttttcgggygtgtttttttggttttgcgattttcgggatagcgttgagaatacgcggaaggtggggagacgcgcggcgttggtcgggtttttggcgtcgttttcgcggtgtagtttgtgtttgggagttcggtcgttttattttagaattagagtaaa

SEQ ID NO: 230 - DNA, 300 bp, synthetic construct
  source 1..300: mol_type = other DNA
  modified_base 5: mod_base = OTHER; note = uracil
  modified_base 7: mod_base = OTHER; note = uracil
  modified_base 13: mod_base = OTHER; note = uracil
  modified_base 27: mod_base = OTHER; note = uracil
  modified_base 32: mod_base = OTHER; note = uracil
  modified_base 34..36: mod_base = OTHER; note = uracil
  modified_base 40: mod_base = OTHER; note = uracil
  modified_base 42: mod_base = OTHER; note = uracil
  modified_base 46: mod_base = OTHER; note = uracil
  modified_base 49: mod_base = OTHER; note = uracil
  modified_base 51: mod_base = OTHER; note = uracil
  modified_base 65..66: mod_base = OTHER; note = uracil
  modified_base 72..73: mod_base = OTHER; note = uracil
  modified_base 77..78: mod_base = OTHER; note = uracil
  modified_base 83: mod_base = OTHER; note = uracil
  modified_base 91: mod_base = OTHER; note = uracil
  modified_base 93..96: mod_base = OTHER; note = uracil
  modified_base 98..99: mod_base = OTHER; note = uracil
  modified_base 102: mod_base = OTHER; note = uracil
  modified_base 111: mod_base = OTHER; note = uracil
  modified_base 113: mod_base = OTHER; note = uracil
  modified_base 118: mod_base = OTHER; note = uracil
  modified_base 122..123: mod_base = OTHER; note = uracil
  modified_base 133: mod_base = OTHER; note = uracil
  modified_base 138..139: mod_base = OTHER; note = uracil
  modified_base 147: mod_base = OTHER; note = uracil
  modified_base 151..152: mod_base = OTHER; note = uracil
  modified_base 161..162: mod_base = OTHER; note = uracil
  modified_base 170..171: mod_base = OTHER; note = uracil
  modified_base 178: mod_base = OTHER; note = uracil
  modified_base 188..189: mod_base = OTHER; note = uracil
  modified_base 196..197: mod_base = OTHER; note = uracil
  modified_base 206: mod_base = OTHER; note = uracil
  modified_base 231..232: mod_base = OTHER; note = uracil
  modified_base 237: mod_base = OTHER; note = uracil
  modified_base 239..240: mod_base = OTHER; note = uracil
  modified_base 250: mod_base = OTHER; note = uracil
  modified_base 256: mod_base = OTHER; note = uracil
  modified_base 262: mod_base = OTHER; note = uracil
  modified_base 270: mod_base = OTHER; note = uracil
  modified_base 280: mod_base = OTHER; note = uracil
  modified_base 285: mod_base = OTHER; note = uracil
  modified_base 300: mod_base = OTHER; note = uracil
  modified_base 24: mod_base = m5c
  modified_base 28: mod_base = m5c
  modified_base 52: mod_base = m5c
  modified_base 54: mod_base = m5c
  modified_base 60: mod_base = m5c
  modified_base 63: mod_base = m5c
  modified_base 74: mod_base = m5c
  modified_base 81: mod_base = m5c
  modified_base 84: mod_base = m5c
  modified_base 86: mod_base = m5c
  modified_base 88: mod_base = m5c
  modified_base 103: mod_base = m5c
  modified_base 105: mod_base = m5c
  modified_base 116: mod_base = m5c
  modified_base 124: mod_base = m5c
  modified_base 131: mod_base = m5c
  modified_base 153: mod_base = m5c
  modified_base 165: mod_base = m5c
  modified_base 174: mod_base = m5c
  modified_base 183: mod_base = m5c
  modified_base 190: mod_base = m5c
  modified_base 204: mod_base = m5c
  modified_base 213: mod_base = m5c
  modified_base 221: mod_base = m5c
  modified_base 228: mod_base = m5c
  modified_base 235: mod_base = m5c
  modified_base 243: mod_base = m5c
  modified_base 260: mod_base = m5c
  modified_base 271: mod_base = m5c
  modified_base 294: mod_base = m5c
  modified_base 297: mod_base = m5c
  variation 149: note = CpG site, residue is C if methylated or T(=U) if unmethylated
tttgttttggttttgaggtgggacggtcggatttttaggtataggttgtatcgcgagaacggcgttagggattcggttagcgtcgcgcgtttttttatttttcgcgtgtttttagcgttgtttcgggggtcgtagggttaggaagataygttcggggggatttgcgggatttgcggattgggcggggttcggggttttgtgggcgtagaggacgggaggacgaagggcggtttgcgtttttgcgggtggttgaggtaagcgtagaaatatcgggttgggtaagattggaaaagcggcggt

SEQ ID NO: 231 - DNA, 300 bp, synthetic construct
  source 1..300: mol_type = other DNA
  modified_base 1..2: mod_base = OTHER; note = uracil
  modified_base 8: mod_base = OTHER; note = uracil
  modified_base 12: mod_base = OTHER; note = uracil
  modified_base 14: mod_base = OTHER; note = uracil
  modified_base 23: mod_base = OTHER; note = uracil
  modified_base 26: mod_base = OTHER; note = uracil
  modified_base 31..32: mod_base = OTHER; note = uracil
  modified_base 35: mod_base = OTHER; note = uracil
  modified_base 38: mod_base = OTHER; note = uracil
  modified_base 42: mod_base = OTHER; note = uracil
  modified_base 44..45: mod_base = OTHER; note = uracil
  modified_base 50: mod_base = OTHER; note = uracil
  modified_base 54: mod_base = OTHER; note = uracil
  modified_base 56: mod_base = OTHER; note = uracil
  modified_base 60: mod_base = OTHER; note = uracil
  modified_base 63: mod_base = OTHER; note = uracil
  modified_base 66..70: mod_base = OTHER; note = uracil
  modified_base 74..75: mod_base = OTHER; note = uracil
  modified_base 78..81: mod_base = OTHER; note = uracil
  modified_base 83..86: mod_base = OTHER; note = uracil
  modified_base 90: mod_base = OTHER; note = uracil
  modified_base 93: mod_base = OTHER; note = uracil
  modified_base 97..98: mod_base = OTHER; note = uracil
  modified_base 100: mod_base = OTHER; note = uracil
  modified_base 105: mod_base = OTHER; note = uracil
  modified_base 112: mod_base = OTHER; note = uracil
  modified_base 115: mod_base = OTHER; note = uracil
  modified_base 118..119: mod_base = OTHER; note = uracil
  modified_base 123: mod_base = OTHER; note = uracil
  modified_base 128..129: mod_base = OTHER; note = uracil
  modified_base 132..133: mod_base = OTHER; note = uracil
  modified_base 135: mod_base = OTHER; note = uracil
  modified_base 138: mod_base = OTHER; note = uracil
  modified_base 146: mod_base = OTHER; note = uracil
  modified_base 159: mod_base = OTHER; note = uracil
  modified_base 162..163: mod_base = OTHER; note = uracil
  modified_base 169..170: mod_base = OTHER; note = uracil
  modified_base 174: mod_base = OTHER; note = uracil
  modified_base 176..177: mod_base = OTHER; note = uracil
  modified_base 181..184: mod_base = OTHER; note = uracil
  modified_base 186: mod_base = OTHER; note = uracil
  modified_base 198: mod_base = OTHER; note = uracil
  modified_base 204: mod_base = OTHER; note = uracil
  modified_base 208: mod_base = OTHER; note = uracil
  modified_base 211..213: mod_base = OTHER; note = uracil
  modified_base 219: mod_base = OTHER; note = uracil
  modified_base 222: mod_base = OTHER; note = uracil
  modified_base 227: mod_base = OTHER; note = uracil
  modified_base 230: mod_base = OTHER; note = uracil
  modified_base 233..235: mod_base = OTHER; note = uracil
  modified_base 245: mod_base = OTHER; note = uracil
  modified_base 253: mod_base = OTHER; note = uracil
  modified_base 255..256: mod_base = OTHER; note = uracil
  modified_base 258: mod_base = OTHER; note = uracil
  modified_base 262: mod_base = OTHER; note = uracil
  modified_base 264: mod_base = OTHER; note = uracil
  modified_base 266: mod_base = OTHER; note = uracil
  modified_base 268..270: mod_base = OTHER; note = uracil
  modified_base 275: mod_base = OTHER; note = uracil
  modified_base 277..279: mod_base = OTHER; note = uracil
  modified_base 285: mod_base = OTHER; note = uracil
  modified_base 291: mod_base = OTHER; note = uracil
  modified_base 39: mod_base = m5c
  modified_base 48: mod_base = m5c
  modified_base 94: mod_base = m5c
  modified_base 130: mod_base = m5c
  modified_base 147: mod_base = m5c
  modified_base 171: mod_base = m5c
  modified_base 237: mod_base = m5c
  modified_base 271: mod_base = m5c
  variation 151: note = CpG site, residue is C if methylated or T(=U) if unmethylated
tttgggataggtttaatggaggttgtagggttattagtcgatttttacgtaggtttagttagtagttttttggttagttttatttttgattgtcggttttagaattgggagttgttttttggtagggttcgtttttgttgggagatcggayggtgagttagttttaagttcggtattagatttttttgaggatggagtaggagttggttgttttgaggttgtaaaattttttttttcgtggagatagggaggtattttagatatttatttcggatttttttgaatagggatagggaggaa

SEQ ID NO: 232 - DNA, 300 bp, synthetic construct
  source 1..300: mol_type = other DNA
  modified_base 3..4: mod_base = OTHER; note = uracil
  modified_base 6..8: mod_base = OTHER; note = uracil
  modified_base 12..14: mod_base = OTHER; note = uracil
  modified_base 19: mod_base = OTHER; note = uracil
  modified_base 28: mod_base = OTHER; note = uracil
  modified_base 41: mod_base = OTHER; note = uracil
  modified_base 49..50: mod_base = OTHER; note = uracil
  modified_base 52..54: mod_base = OTHER; note = uracil
  modified_base 58: mod_base = OTHER; note = uracil
  modified_base 60..61: mod_base = OTHER; note = uracil
  modified_base 80: mod_base = OTHER; note = uracil
  modified_base 83..84: mod_base = OTHER; note = uracil
  modified_base 86: mod_base = OTHER; note = uracil
  modified_base 91: mod_base = OTHER; note = uracil
  modified_base 94..95: mod_base = OTHER; note = uracil
  modified_base 98: mod_base = OTHER; note = uracil
  modified_base 100..101: mod_base = OTHER; note = uracil
  modified_base 104: mod_base = OTHER; note = uracil
  modified_base 106..107: mod_base = OTHER; note = uracil
  modified_base 110..111: mod_base = OTHER; note = uracil
  modified_base 113: mod_base = OTHER; note = uracil
  modified_base 122: mod_base = OTHER; note = uracil
  modified_base 128: mod_base = OTHER; note = uracil
  modified_base 133: mod_base = OTHER; note = uracil
  modified_base 140: mod_base = OTHER; note = uracil
  modified_base 144: mod_base = OTHER; note = uracil
  modified_base 146: mod_base = OTHER; note = uracil
  modified_base 148: mod_base = OTHER; note = uracil
  modified_base 152: mod_base = OTHER; note = uracil
  modified_base 157: mod_base = OTHER; note = uracil
  modified_base 159..161: mod_base = OTHER; note = uracil
  modified_base 164: mod_base = OTHER; note = uracil
  modified_base 174..176: mod_base = OTHER; note = uracil
  modified_base 179..180: mod_base = OTHER; note = uracil
  modified_base 187: mod_base = OTHER; note = uracil
  modified_base 190: mod_base = OTHER; note = uracil
  modified_base 192..194: mod_base = OTHER; note = uracil
  modified_base 199: mod_base = OTHER; note = uracil
  modified_base 205: mod_base = OTHER; note = uracil
  modified_base 209: mod_base = OTHER; note = uracil
  modified_base 213: mod_base = OTHER; note = uracil
  modified_base 224: mod_base = OTHER; note = uracil
  modified_base 228..229: mod_base = OTHER; note = uracil
  modified_base 236: mod_base = OTHER; note = uracil
  modified_base 239: mod_base = OTHER; note = uracil
  modified_base 243: mod_base = OTHER; note = uracil
  modified_base 248..249: mod_base = OTHER; note = uracil
  modified_base 264: mod_base = OTHER; note = uracil
  modified_base 271..273: mod_base = OTHER; note = uracil
  modified_base 276: mod_base = OTHER; note = uracil
  modified_base 279..280: mod_base = OTHER; note = uracil
  modified_base 282..283: mod_base = OTHER; note = uracil
  modified_base 290..291: mod_base = OTHER; note = uracil
  modified_base 295..297: mod_base = OTHER; note = uracil
  modified_base 29: mod_base = m5c
  modified_base 63: mod_base = m5c
  modified_base 129: mod_base = m5c
  modified_base 153: mod_base = m5c
  modified_base 170: mod_base = m5c
  modified_base 206: mod_base = m5c
  modified_base 252: mod_base = m5c
  modified_base 261: mod_base = m5c
  variation 149: note = CpG site, residue is C if methylated or T(=U) if unmethylated
tttttttttgtttttgtttaagggagttcggggtgagtgtttgaggtgtttttttgtttttacgagggaagaagttttgtagttttagggtagttagtttttgttttatttttagaggggtttggtgtcgggtttaaggttgatttatygttcggttttttagtagaggcgggttttgttaggaagtagtttttagttttgaggtcggtagttaggggtggggttggttagggggttgttgattgagtttgcgtaggagtcggttgatggttttgtagtttttattgagtttgttttagg

SEQ ID NO: 233 - DNA, 300 bp, synthetic construct
  source 1..300: mol_type = other DNA
  modified_base 2: mod_base = OTHER; note = uracil
  modified_base 4: mod_base = OTHER; note = uracil
  modified_base 12: mod_base = OTHER; note = uracil
  modified_base 22: mod_base = OTHER; note = uracil
  modified_base 25: mod_base = OTHER; note = uracil
  modified_base 27: mod_base = OTHER; note = uracil
  modified_base 35: mod_base = OTHER; note = uracil
  modified_base 43..44: mod_base = OTHER; note = uracil
  modified_base 49: mod_base = OTHER; note = uracil
  modified_base 54: mod_base = OTHER; note = uracil
  modified_base 58..59: mod_base = OTHER; note = uracil
  modified_base 63: mod_base = OTHER; note = uracil
  modified_base 71: mod_base = OTHER; note = uracil
  modified_base 74: mod_base = OTHER; note = uracil
  modified_base 94: mod_base = OTHER; note = uracil
  modified_base 100: mod_base = OTHER; note = uracil
  modified_base 105..106: mod_base = OTHER; note = uracil
  modified_base 110..111: mod_base = OTHER; note = uracil
  modified_base 113..115: mod_base = OTHER; note = uracil
  modified_base 117: mod_base = OTHER; note = uracil
  modified_base 119: mod_base = OTHER; note = uracil
  modified_base 121: mod_base = OTHER; note = uracil
  modified_base 124..126: mod_base = OTHER; note = uracil
  modified_base 131: mod_base = OTHER; note = uracil
  modified_base 133: mod_base = OTHER; note = uracil
  modified_base 135: mod_base = OTHER; note = uracil
  modified_base 139: mod_base = OTHER; note = uracil
  modified_base 144: mod_base = OTHER; note = uracil
  modified_base 146: mod_base = OTHER; note = uracil
  modified_base 153..154: mod_base = OTHER; note = uracil
  modified_base 156: mod_base = OTHER; note = uracil
  modified_base 160: mod_base = OTHER; note = uracil
  modified_base 168: mod_base = OTHER; note = uracil
  modified_base 171: mod_base = OTHER; note = uracil
  modified_base 174: mod_base = OTHER; note = uracil
  modified_base 176: mod_base = OTHER; note = uracil
  modified_base 194: mod_base = OTHER; note = uracil
  modified_base 206: mod_base = OTHER; note = uracil
  modified_base 221: mod_base = OTHER; note = uracil
  modified_base 226: mod_base = OTHER; note = uracil
  modified_base 233: mod_base = OTHER; note = uracil
  modified_base 235: mod_base = OTHER; note = uracil
  modified_base 239: mod_base = OTHER; note = uracil
  modified_base 243..245: mod_base = OTHER; note = uracil
  modified_base 248..249: mod_base = OTHER; note = uracil
  modified_base 266: mod_base = OTHER; note = uracil
  modified_base 275: mod_base = OTHER; note = uracil
  modified_base 282..284: mod_base = OTHER; note = uracil
  modified_base 290: mod_base = OTHER; note = uracil
  modified_base 51: mod_base = m5c
  modified_base 108: mod_base = m5c
  modified_base 140: mod_base = m5c
  modified_base 166: mod_base = m5c
  modified_base 207: mod_base = m5c
  modified_base 218: mod_base = m5c
  modified_base 229: mod_base = m5c
  variation 150: note = CpG site, residue is C if methylated or T(=U) if unmethylated
atattgtggggtagggaggggtattttttgagaataaaagatttatttttcgattttttaaattggagagttttttgagagaaaagagagagataggtataggtttacgttatttatatatagttttgtgtatatagatcggatataggygtttataggtaagttcgtagttgtttattttgtgaagtgaatgttgatttgggggtcgggtggggttcgtttgtatatcgtgtattgttagattttttttgaaggatttttgttattgaagtattagaaggtttttgttttaaggtggtg

SEQ ID NO: 234 - DNA, 300 bp, synthetic construct
  source 1..300: mol_type = other DNA
  modified_base 2..3: mod_base = OTHER; note = uracil
  modified_base 5..6: mod_base = OTHER; note = uracil
  modified_base 13: mod_base = OTHER; note = uracil
  modified_base 19..20: mod_base = OTHER; note = uracil
  modified_base 23: mod_base = OTHER; note = uracil
  modified_base 29: mod_base = OTHER; note = uracil
  modified_base 32: mod_base = OTHER; note = uracil
  modified_base 38: mod_base = OTHER; note = uracil
  modified_base 45..46: mod_base = OTHER; note = uracil
  modified_base 49: mod_base = OTHER; note = uracil
  modified_base 59: mod_base = OTHER; note = uracil
  modified_base 63: mod_base = OTHER; note = uracil
  modified_base 68: mod_base = OTHER; note = uracil
  modified_base 77: mod_base = OTHER; note = uracil
  modified_base 85..88: mod_base = OTHER; note = uracil
  modified_base 90..91: mod_base = OTHER; note = uracil
  modified_base 95..99: mod_base = OTHER; note = uracil
  modified_base 104: mod_base = OTHER; note = uracil
  modified_base 107: mod_base = OTHER; note = uracil
  modified_base 111: mod_base = OTHER; note = uracil
  modified_base 113: mod_base = OTHER; note = uracil
  modified_base 116: mod_base = OTHER; note = uracil
  modified_base 118: mod_base = OTHER; note = uracil
  modified_base 127: mod_base = OTHER; note = uracil
  modified_base 130: mod_base = OTHER; note = uracil
  modified_base 137: mod_base = OTHER; note = uracil
  modified_base 141..142: mod_base = OTHER; note = uracil
  modified_base 151..152: mod_base = OTHER; note = uracil
  modified_base 158: mod_base = OTHER; note = uracil
  modified_base 163: mod_base = OTHER; note = uracil
  modified_base 170: mod_base = OTHER; note = uracil
  modified_base 172: mod_base = OTHER; note = uracil
  modified_base 177: mod_base = OTHER; note = uracil
  modified_base 197..198: mod_base = OTHER; note = uracil
  modified_base 203..204: mod_base = OTHER; note = uracil
  modified_base 208: mod_base = OTHER; note = uracil
  modified_base 210: mod_base = OTHER; note = uracil
  modified_base 212: mod_base = OTHER; note = uracil
  modified_base 214: mod_base = OTHER; note = uracil
  modified_base 219: mod_base = OTHER; note = uracil
  modified_base 221: mod_base = OTHER; note = uracil
  modified_base 223: mod_base = OTHER; note = uracil
  modified_base 230: mod_base = OTHER; note = uracil
  modified_base 232: mod_base = OTHER; note = uracil
  modified_base 234..235: mod_base = OTHER; note = uracil
  modified_base 260: mod_base = OTHER; note = uracil
  modified_base 268: mod_base = OTHER; note = uracil
  modified_base 270: mod_base = OTHER; note = uracil
  modified_base 279..282: mod_base = OTHER; note = uracil
  modified_base 284..286: mod_base = OTHER; note = uracil
  modified_base 289..292: mod_base = OTHER; note = uracil
  modified_base 294: mod_base = OTHER; note = uracil
  modified_base 70: mod_base = m5c
  modified_base 81: mod_base = m5c
  modified_base 92: mod_base = m5c
  modified_base 133: mod_base = m5c
  modified_base 159: mod_base = m5c
  modified_base 191: mod_base = m5c
  modified_base 248: mod_base = m5c
  variation 149: note = CpG site, residue is C if methylated or T(=U) if unmethylated
attattttagaataagggttttttgatattttagtaataaaaattttttaggaagggtttgatagtgtacgatgtatagacgaattttattcggtttttaaattagtatttattttataaaatgagtagttgcgaatttgtttgtggaygtttgtgttcggtttgtgtgtatagggttgtgtgtgggtggcgtggatttgtatttgtttttttttttttttttaagaagttttttagtttggaaagtcgagaaatggattttttgtttttaagagatgtttttttttgttttatagtgtg

SEQ ID NO: 235 - DNA, 300 bp, synthetic construct
  source 1..300: mol_type = other DNA
  modified_base 2..4: mod_base = OTHER; note = uracil
  modified_base 12: mod_base = OTHER; note = uracil
  modified_base 19: mod_base = OTHER; note = uracil
  modified_base 41: mod_base = OTHER; note = uracil
  modified_base 47: mod_base = OTHER; note = uracil
  modified_base 49: mod_base = OTHER; note = uracil
  modified_base 58: mod_base = OTHER; note = uracil
  modified_base 61: mod_base = OTHER; note = uracil
  modified_base 64: mod_base = OTHER; note = uracil
  modified_base 67: mod_base = OTHER; note = uracil
  modified_base 69..71: mod_base = OTHER; note = uracil
  modified_base 74: mod_base = OTHER; note = uracil
  modified_base 76: mod_base = OTHER; note = uracil
  modified_base 81: mod_base = OTHER; note = uracil
  modified_base 84..86: mod_base = OTHER; note = uracil
  modified_base 90: mod_base = OTHER; note = uracil
  modified_base 92: mod_base = OTHER; note = uracil
  modified_base 111..114: mod_base = OTHER; note = uracil
  modified_base 124..125: mod_base = OTHER; note = uracil
  modified_base 127: mod_base = OTHER; note = uracil
  modified_base 130: mod_base = OTHER; note = uracil
  modified_base 133: mod_base = OTHER; note = uracil
  modified_base 137: mod_base = OTHER; note = uracil
  modified_base 148: mod_base = OTHER; note = uracil
  modified_base 150..151: mod_base = OTHER; note = uracil
  modified_base 154: mod_base = OTHER; note = uracil
  modified_base 169: mod_base = OTHER; note = uracil
  modified_base 176: mod_base = OTHER; note = uracil
  modified_base 181: mod_base = OTHER; note = uracil
  modified_base 192: mod_base = OTHER; note = uracil
  modified_base 194: mod_base = OTHER; note = uracil
  modified_base 199: mod_base = OTHER; note = uracil
  modified_base 203: mod_base = OTHER; note = uracil
  modified_base 205: mod_base = OTHER; note = uracil
  modified_base 214: mod_base = OTHER; note = uracil
  modified_base 218..219: mod_base = OTHER; note = uracil
  modified_base 226..227: mod_base = OTHER; note = uracil
  modified_base 237: mod_base = OTHER; note = uracil
  modified_base 245..246: mod_base = OTHER; note = uracil
  modified_base 248: mod_base = OTHER; note = uracil
  modified_base 250: mod_base = OTHER; note = uracil
  modified_base 262: mod_base = OTHER; note = uracil
  modified_base 264: mod_base = OTHER; note = uracil
  modified_base 267..271: mod_base = OTHER; note = uracil
  modified_base 281..282: mod_base = OTHER; note = uracil
  modified_base 289: mod_base = OTHER; note = uracil
  modified_base 292..294: mod_base = OTHER; note = uracil
  modified_base 296..297: mod_base = OTHER; note = uracil
  modified_base 6: mod_base = m5c
  modified_base 93: mod_base = m5c
  modified_base 108: mod_base = m5c
  modified_base 121: mod_base = m5c
  modified_base 131: mod_base = m5c
  modified_base 134: mod_base = m5c
  modified_base 185: mod_base = m5c
  modified_base 187: mod_base = m5c
  modified_base 210: mod_base = m5c
  modified_base 215: mod_base = m5c
  modified_base 228: mod_base = m5c
  modified_base 251: mod_base = m5c
  modified_base 286: mod_base = m5c
  modified_base 290: mod_base = m5c
  modified_base 299: mod_base = m5c
  variation 138: note = CpG site, residue is C if methylated or T(=U) if unmethylated
  variation 155: note = CpG site, residue is C if methylated or T(=U) if unmethylated
  variation 163: note = CpG site, residue is C if methylated or T(=U) if unmethylated
atttacggggataggggttagagtaatggagtggaaatggtaggtttataattttggttatagttgtttttatttttaagtaatttaggtttcgggttggagggtggcgattttaagatgcggttttagtcgtcggtygtgtttgtgttttagtygatgaagygagtgtaaagggttgtataaacgcgaggtattgaataaatattgagcgtgtcgtttagatgtttcgggggaggttgaggatttatatcgtggggagtgttttgtttttatggagtgatttggcgttcgttttttacg

SEQ ID NO: 236 - DNA, 300 bp, synthetic construct
  source 1..300: mol_type = other DNA
  modified_base 16..17: mod_base = OTHER; note = uracil
  modified_base 22: mod_base = OTHER; note = uracil
  modified_base 24: mod_base = OTHER; note = uracil
  modified_base 26..27: mod_base = OTHER; note = uracil
  modified_base 35: mod_base = OTHER; note = uracil
  modified_base 40: mod_base = OTHER; note = uracil
  modified_base 42: mod_base = OTHER; note = uracil
  modified_base 44..47: mod_base = OTHER; note = uracil
  modified_base 59..60: mod_base = OTHER; note = uracil
  modified_base 62: mod_base = OTHER; note = uracil
  modified_base 65..66: mod_base = OTHER; note = uracil
  modified_base 68..71: mod_base = OTHER; note = uracil
  modified_base 77: mod_base = OTHER; note = uracil
  modified_base 80: mod_base = OTHER; note = uracil
  modified_base 88: mod_base = OTHER; note = uracil
  modified_base 92: mod_base = OTHER; note = uracil
  modified_base 94: mod_base = OTHER; note = uracil
  modified_base 105: mod_base = OTHER; note = uracil
  modified_base 110..111: mod_base = OTHER; note = uracil
  modified_base 123: mod_base = OTHER; note = uracil
  modified_base 126..128: mod_base = OTHER; note = uracil
  modified_base 133: mod_base = OTHER; note = uracil
  modified_base 135: mod_base = OTHER; note = uracil
  modified_base 139: mod_base = OTHER; note = uracil
  modified_base 142: mod_base = OTHER; note = uracil
  modified_base 148: mod_base = OTHER; note = uracil
  modified_base 154: mod_base = OTHER; note = uracil
  modified_base 156: mod_base = OTHER; note = uracil
  modified_base 160: mod_base = OTHER; note = uracil
  modified_base 165: mod_base = OTHER; note = uracil
  modified_base 172: mod_base = OTHER; note = uracil
  modified_base 178: mod_base = OTHER; note = uracil
  modified_base 181: mod_base = OTHER; note = uracil
  modified_base 184: mod_base = OTHER; note = uracil
  modified_base 194..195: mod_base = OTHER; note = uracil
  modified_base 197..199: mod_base = OTHER; note = uracil
  modified_base 201..202: mod_base = OTHER; note = uracil
  modified_base 205..206: mod_base = OTHER; note = uracil
  modified_base 212..213: mod_base = OTHER; note = uracil
  modified_base 221: mod_base = OTHER; note = uracil
  modified_base 235: mod_base = OTHER; note = uracil
  modified_base 238: mod_base = OTHER; note = uracil
  modified_base 244..245: mod_base = OTHER; note = uracil
  modified_base 257..258: mod_base = OTHER; note = uracil
  modified_base 261..262: mod_base = OTHER; note = uracil
  modified_base 267..268: mod_base = OTHER; note = uracil
  modified_base 270: mod_base = OTHER; note = uracil
  modified_base 272..273: mod_base = OTHER; note = uracil
  modified_base 278: mod_base = OTHER; note = uracil
  modified_base 280: mod_base = OTHER; note = uracil
  modified_base 284..287: mod_base = OTHER; note = uracil
  modified_base 291..293: mod_base = OTHER; note = uracil
  modified_base 1: mod_base = m5c
  modified_base 10: mod_base = m5c
  modified_base 14: mod_base = m5c
  modified_base 49: mod_base = m5c
  modified_base 72: mod_base = m5c
  modified_base 85: mod_base = m5c
  modified_base 90: mod_base = m5c
  modified_base 113: mod_base = m5c
  modified_base 115: mod_base = m5c
  modified_base 166: mod_base = m5c
  modified_base 169: mod_base = m5c
  modified_base 179: mod_base = m5c
  modified_base 192: mod_base = m5c
  modified_base 207: mod_base = m5c
  modified_base 294: mod_base = m5c
  variation 137: note = CpG site, residue is C if methylated or T(=U) if unmethylated
  variation 145: note = CpG site, residue is C if methylated or T(=U) if unmethylated
  variation 162: note = CpG site, residue is C if methylated or T(=U) if unmethylated
cgtggagggcggacgttaggttattttatgggggtagagtattttttacggtgtggatttttagtttttttcgggatatttggacggtacgtttagtgtttgtttagtgtttcgcgtttgtatagttttttgtattygttttatyggttggagtataaatayggtcggcggttgaggtcgtattttggggtcgttattttttaattcggagtttgggttgtttagagatgggagtagttgtagttaaaattgtgaatttgttatttttattttattattttgatttttgttttcgtgggt

SEQ ID NO: 237 - DNA, 300 bp, synthetic construct
  source 1..300: mol_type = other DNA
  modified_base 11: mod_base = OTHER; note = uracil
  modified_base 14..16: mod_base = OTHER; note = uracil
  modified_base 22: mod_base = OTHER; note = uracil
  modified_base 25..26: mod_base = OTHER; note = uracil
  modified_base 31: mod_base = OTHER; note = uracil
  modified_base 34..35: mod_base = OTHER; note = uracil
  modified_base 39..40: mod_base = OTHER; note = uracil
  modified_base 47: mod_base = OTHER; note = uracil
  modified_base 51..52: mod_base = OTHER; note = uracil
  modified_base 59..61: mod_base = OTHER; note = uracil
  modified_base 63..64: mod_base = OTHER; note = uracil
  modified_base 67: mod_base = OTHER; note = uracil
  modified_base 74..76: mod_base = OTHER; note = uracil
  modified_base 78..79: mod_base = OTHER; note = uracil
  modified_base 82..83: mod_base = OTHER; note = uracil
  modified_base 85..86: mod_base = OTHER; note = uracil
  modified_base 94..96: mod_base = OTHER; note = uracil
  modified_base 99: mod_base = OTHER; note = uracil
  modified_base 101..102: mod_base = OTHER; note = uracil
  modified_base 107..108: mod_base = OTHER; note = uracil
  modified_base 111: mod_base = OTHER; note = uracil
  modified_base 121..122: mod_base = OTHER; note = uracil
  modified_base 124: mod_base = OTHER; note = uracil
  modified_base 129: mod_base = OTHER; note = uracil
  modified_base 133: mod_base = OTHER; note = uracil
  modified_base 136: mod_base = OTHER; note = uracil
  modified_base 141..143: mod_base = OTHER; note = uracil
  modified_base 147: mod_base = OTHER; note = uracil
  modified_base 156..158: mod_base = OTHER; note = uracil
  modified_base 170: mod_base = OTHER; note = uracil
  modified_base 172..173: mod_base = OTHER; note = uracil
  modified_base 176: mod_base = OTHER; note = uracil
  modified_base 186: mod_base = OTHER; note = uracil
  modified_base 189: mod_base = OTHER; note = uracil
  modified_base 193..194: mod_base = OTHER; note = uracil
  modified_base 196: mod_base = OTHER; note = uracil
  modified_base 209: mod_base = OTHER; note = uracil
  modified_base 219..220: mod_base = OTHER; note = uracil
  modified_base 223..224: mod_base = OTHER; note = uracil
  modified_base 227..228: mod_base = OTHER; note = uracil
  modified_base 233: mod_base = OTHER; note = uracil
  modified_base 240..241: mod_base = OTHER; note = uracil
  modified_base 244..245: mod_base = OTHER; note = uracil
  modified_base 247: mod_base = OTHER; note = uracil
  modified_base 250..251: mod_base = OTHER; note = uracil
  modified_base 253: mod_base = OTHER; note = uracil
  modified_base 256: mod_base = OTHER; note = uracil
  modified_base 259..261: mod_base = OTHER; note = uracil
  modified_base 266: mod_base = OTHER; note = uracil
  modified_base 270: mod_base = OTHER; note = uracil
  modified_base 278: mod_base = OTHER; note = uracil
  modified_base 285: mod_base = OTHER; note = uracil
  modified_base 1: mod_base = m5c
  modified_base 8: mod_base = m5c
  modified_base 17: mod_base = m5c
  modified_base 19: mod_base = m5c
  modified_base 28: mod_base = m5c
  modified_base 36: mod_base = m5c
  modified_base 41: mod_base = m5c
  modified_base 43: mod_base = m5c
  modified_base 68: mod_base = m5c
  modified_base 88: mod_base = m5c
  modified_base 115: mod_base = m5c
  modified_base 119: mod_base = m5c
  modified_base 153: mod_base = m5c
  modified_base 159: mod_base = m5c
  modified_base 174: mod_base = m5c
  modified_base 179: mod_base = m5c
  modified_base 210: mod_base = m5c
  modified_base 221: mod_base = m5c
  modified_base 229: mod_base = m5c
  modified_base 235: mod_base = m5c
  modified_base 238: mod_base = m5c
  modified_base 274: mod_base = m5c
  modified_base 293: mod_base = m5c
  variation 150: note = CpG site, residue is C if methylated or T(=U) if unmethylated
cgaggtgcggttgtttcgcggttttttcggtttttcgtttcgcgtgtttttttggagttttttttttcggaggtttttttgtttttacgtgtgtttttttttatgtttagtattcgggcgttttttgttttttttttgttttttggtttyggcgttttcgggagtgtgattttcgtagcggggtgtagtttttttttgggatgagtgatcggagggaattcgttttttcgggtacgtcgttagtttttttttttttttttttaggttattaagcggatttatgataagaaggcggtggat

SEQ ID NO: 238 - DNA, 300 bp, synthetic construct
  source 1..300: mol_type = other DNA
  modified_base 3..4: mod_base = OTHER; note = uracil
  modified_base 6: mod_base = OTHER; note = uracil
  modified_base 9..10: mod_base = OTHER; note = uracil
  modified_base 13: mod_base = OTHER; note = uracil
  modified_base 18: mod_base = OTHER; note = uracil
  modified_base 25: mod_base = OTHER; note = uracil
  modified_base 28: mod_base = OTHER; note = uracil
  modified_base 36..37: mod_base = OTHER; note = uracil
  modified_base 58: mod_base = OTHER; note = uracil
  modified_base 69..70: mod_base = OTHER; note = uracil
  modified_base 85..87: mod_base = OTHER; note = uracil
  modified_base 89: mod_base = OTHER; note = uracil
  modified_base 94: mod_base = OTHER; note = uracil
  modified_base 96: mod_base = OTHER; note = uracil
  modified_base 98: mod_base = OTHER; note = uracil
  modified_base 101..103: mod_base = OTHER; note = uracil
  modified_base 113: mod_base = OTHER; note = uracil
  modified_base 116: mod_base = OTHER; note = uracil
  modified_base 118..120: mod_base = OTHER; note = uracil
  modified_base 123: mod_base = OTHER; note = uracil
  modified_base 133: mod_base = OTHER; note = uracil
  modified_base 135: mod_base = OTHER; note = uracil
  modified_base 137: mod_base = OTHER; note = uracil
  modified_base 139..140: mod_base = OTHER; note = uracil
  modified_base 149: mod_base = OTHER; note = uracil
  modified_base 155..156: mod_base = OTHER; note = uracil
  modified_base 163: mod_base = OTHER; note = uracil
  modified_base 174: mod_base = OTHER; note = uracil
  modified_base 183..184: mod_base = OTHER; note = uracil
  modified_base 191: mod_base = OTHER; note = uracil
  modified_base 196: mod_base = OTHER; note = uracil
  modified_base 208: mod_base = OTHER; note = uracil
  modified_base 210: mod_base = OTHER; note = uracil
  modified_base 220: mod_base = OTHER; note = uracil
  modified_base 228..229: mod_base = OTHER; note = uracil
  modified_base 231: mod_base = OTHER; note = uracil
  modified_base 244: mod_base = OTHER; note = uracil
  modified_base 246..247: mod_base = OTHER; note = uracil
  modified_base 255: mod_base = OTHER; note = uracil
  modified_base 271: mod_base = OTHER; note = uracil
  modified_base 280: mod_base = OTHER; note = uracil
  modified_base 288: mod_base = OTHER; note = uracil
  modified_base 291: mod_base = OTHER; note = uracil
  modified_base 294: mod_base = OTHER; note = uracil
  modified_base 296..297: mod_base = OTHER; note = uracil
  modified_base 7: mod_base = m5c
  modified_base 26: mod_base = m5c
  modified_base 62: mod_base = m5c
  modified_base 65: mod_base = m5c
  modified_base 71: mod_base = m5c
  modified_base 79: mod_base = m5c
  modified_base 90: mod_base = m5c
  modified_base 121: mod_base = m5c
  modified_base 126: mod_base = m5c
  modified_base 141: mod_base = m5c
  modified_base 147: mod_base = m5c
  modified_base 181: mod_base = m5c
  modified_base 185: mod_base = m5c
  modified_base 212: mod_base = m5c
  modified_base 232: mod_base = m5c
  modified_base 257: mod_base = m5c
  modified_base 259: mod_base = m5c
  modified_base 264: mod_base = m5c
  modified_base 272: mod_base = m5c
  modified_base 281: mod_base = m5c
  modified_base 283: mod_base = m5c
  modified_base 292: mod_base = m5c
  modified_base 299: mod_base = m5c
  variation 150: note = CpG site, residue is C if methylated or T(=U) if unmethylated
atttatcgtttttttgttataagttcgtttgatagtttagggaagaagaggaagaggttggcgacgtgttcgggaaggcgggtttttttcggttatttattttagaggaaagttgtatttcgttgcgggagttatattttcggggacgtygaagttagggaatagaagaaagataagaggcgttcgaatgttggatatggagaagggtatacgtggaggtaggagggttttcggaaggagggattttaggaaagtacgcgggacgggaagtcgaggaagtcgcggggtagtcgtatttcg

SEQ ID NO: 239 - DNA, 300 bp, synthetic construct
  source 1..300: mol_type = other DNA
  modified_base 3: mod_base = OTHER; note = uracil
  modified_base 12: mod_base = OTHER; note = uracil
  modified_base 17: mod_base = OTHER; note = uracil
  modified_base 19..21: mod_base = OTHER; note = uracil
  modified_base 30: mod_base = OTHER; note = uracil
  modified_base 32..34: mod_base = OTHER; note = uracil
  modified_base 47: mod_base = OTHER; note = uracil
  modified_base 59..60: mod_base = OTHER; note = uracil
  modified_base 68: mod_base = OTHER; note = uracil
  modified_base 71: mod_base = OTHER; note = uracil
  modified_base 73..74: mod_base = OTHER; note = uracil
  modified_base 77: mod_base = OTHER; note = uracil
  modified_base 84: mod_base = OTHER; note = uracil
  modified_base 86: mod_base = OTHER; note = uracil
  modified_base 90..91: mod_base = OTHER; note = uracil
  modified_base 93: mod_base = OTHER; note = uracil
  modified_base 96..97: mod_base = OTHER; note = uracil
  modified_base 99..100: mod_base = OTHER; note = uracil
  modified_base 102: mod_base = OTHER; note = uracil
  modified_base 106: mod_base = OTHER; note = uracil
  modified_base 109: mod_base = OTHER; note = uracil
  modified_base 115..116: mod_base = OTHER; note = uracil
  modified_base 120: mod_base = OTHER; note = uracil
  modified_base 129: mod_base = OTHER; note = uracil
  modified_base 139: mod_base = OTHER; note = uracil
  modified_base 141: mod_base = OTHER; note = uracil
  modified_base 144: mod_base = OTHER; note = uracil
  modified_base 153: mod_base = OTHER; note = uracil
  modified_base 155..156: mod_base = OTHER; note = uracil
  modified_base 165..167: mod_base = OTHER; note = uracil
  modified_base 175: mod_base = OTHER; note = uracil
  modified_base 179: mod_base = OTHER; note = uracil
  modified_base 184: mod_base = OTHER; note = uracil
  modified_base 187..188: mod_base = OTHER; note = uracil
  modified_base 195..196: mod_base = OTHER; note = uracil
  modified_base 201: mod_base = OTHER; note = uracil
  modified_base 206..207: mod_base = OTHER; note = uracil
  modified_base 210: mod_base = OTHER; note = uracil
  modified_base 216..217: mod_base = OTHER; note = uracil
  modified_base 219: mod_base = OTHER; note = uracil
  modified_base 221: mod_base = OTHER; note = uracil
  modified_base 225: mod_base = OTHER; note = uracil
  modified_base 234: mod_base = OTHER; note = uracil
  modified_base 236: mod_base = OTHER; note = uracil
  modified_base 244..246: mod_base = OTHER; note = uracil
  modified_base 249..251: mod_base = OTHER; note = uracil
  modified_base 259..260: mod_base = OTHER; note = uracil
  modified_base 265: mod_base = OTHER; note = uracil
  modified_base 270: mod_base = OTHER; note = uracil
  modified_base 273..274: mod_base = OTHER; note = uracil
  modified_base 281: mod_base = OTHER; note = uracil
  modified_base 297: mod_base = OTHER; note = uracil
  modified_base 110: mod_base = m5c
  modified_base 121: mod_base = m5c
  modified_base 130: mod_base = m5c
  modified_base 157: mod_base = m5c
  modified_base 168: mod_base = m5c
  modified_base 222: mod_base = m5c
  modified_base 227: mod_base = m5c
  variation 136: note = CpG site, residue is C if methylated or T(=U) if unmethylated
  variation 149: note = CpG site, residue is C if methylated or T(=U) if unmethylated
tgtagtgtgtataggattttttgaaagggttttttgggatggagggtttttgggggggtttgtggtttttttttagtatgagttataaattatattttttatagttagtcggatttaaatcgatttgatcgagatyggttttttaatgyggtttttcggggtgttttcgaggatttggttggatttttagagtatttgagtaagattagtaagtattttatcgattcggaatatataggtagattttgttttgtggatttaaggttaggtattttgtgagttgatagttaggtgggttgt

SEQ ID NO: 240 - DNA, 300 bp, synthetic construct
  source 1..300: mol_type = other DNA
  modified_base 1: mod_base = OTHER; note = uracil
  modified_base 4..6: mod_base = OTHER; note = uracil
  modified_base 8..9: mod_base = OTHER; note = uracil
  modified_base 13: mod_base = OTHER; note = uracil
  modified_base 17: mod_base = OTHER; note = uracil
  modified_base 20: mod_base = OTHER; note = uracil
  modified_base 22: mod_base = OTHER; note = uracil
  modified_base 24: mod_base = OTHER; note = uracil
  modified_base 31..32: mod_base = OTHER; note = uracil
  modified_base 36..37: mod_base = OTHER; note = uracil
  modified_base 44..45: mod_base = OTHER; note = uracil
  modified_base 47: mod_base = OTHER; note = uracil
  modified_base 52: mod_base = OTHER; note = uracil
  modified_base 58: mod_base = OTHER; note = uracil
  modified_base 61..62: mod_base = OTHER; note = uracil
  modified_base 71: mod_base = OTHER; note = uracil
  modified_base 87: mod_base = OTHER; note = uracil
  modified_base 91: mod_base = OTHER; note = uracil
  modified_base 96: mod_base = OTHER; note = uracil
  modified_base 100: mod_base = OTHER; note = uracil
  modified_base 102: mod_base = OTHER; note = uracil
  modified_base 108: mod_base = OTHER; note = uracil
  modified_base 110: mod_base = OTHER; note = uracil
  modified_base 118..119: mod_base = OTHER; note = uracil
  modified_base 122..123: mod_base = OTHER; note = uracil
  modified_base 128..129: mod_base = OTHER; note = uracil
  modified_base 137: mod_base = OTHER; note = uracil
  modified_base 139..141: mod_base = OTHER; note = uracil
  modified_base 149: mod_base = OTHER; note = uracil
  modified_base 152: mod_base = OTHER; note = uracil
  modified_base 162: mod_base = OTHER; note = uracil
  modified_base 167: mod_base = OTHER; note = uracil
  modified_base 173: mod_base = OTHER; note = uracil
  modified_base 188: mod_base = OTHER; note = uracil
  modified_base 192: mod_base = OTHER; note = uracil
  modified_base 196: mod_base = OTHER; note = uracil
  modified_base 218: mod_base = OTHER; note = uracil
  modified_base 220: mod_base = OTHER; note = uracil
  modified_base 224: mod_base = OTHER; note = uracil
  modified_base 235..236: mod_base = OTHER; note = uracil
  modified_base 238: mod_base = OTHER; note = uracil
  modified_base 242..248: mod_base = OTHER; note = uracil
  modified_base 254..256: mod_base = OTHER; note = uracil
  modified_base 258..259: mod_base = OTHER; note = uracil
  modified_base 262..264: mod_base = OTHER; note = uracil
  modified_base 271..273: mod_base = OTHER; note = uracil
  modified_base 277: mod_base = OTHER; note = uracil
  modified_base 285..286: mod_base = OTHER; note = uracil
  modified_base 291: mod_base = OTHER; note = uracil
  modified_base 293: mod_base = OTHER; note = uracil
  modified_base 295: mod_base = OTHER; note = uracil
  modified_base 298: mod_base = OTHER; note = uracil
  modified_base 300: mod_base = OTHER; note = uracil
  modified_base 72: mod_base = m5c
  modified_base 77: mod_base = m5c
  modified_base 131: mod_base = m5c
  modified_base 142: mod_base = m5c
  modified_base 169: mod_base = m5c
  modified_base 178: mod_base = m5c
  modified_base 189: mod_base = m5c
  variation 150: note = CpG site, residue is C if methylated or T(=U) if unmethylated
  variation 163: note = CpG site, residue is C if methylated or T(=U) if unmethylated
tagtttatttaattattagtttataggatgtttagttttggatttatagggtagggtttatttgtgtatttcgagtcggtgaggtatttgttggttttgtttaggtattttggaagtttagttagattttcggggatatttcgggagatygtattgaagagtygatttcggttaaatcggtttggattcggttgattgtggaggatgtggtttgtgatttatgttggagaagaattataggtttttttaaaagttttttattttagggagtttttttagggagttttgtatatattgtat

SEQ ID NO: 241 - DNA, 300 bp, synthetic construct
  source 1..300: mol_type = other DNA
  modified_base 6..7: mod_base = OTHER; note = uracil
  modified_base 13..15: mod_base = OTHER; note = uracil
  modified_base 34: mod_base = OTHER; note = uracil
  modified_base 40: mod_base = OTHER; note = uracil
  modified_base 42: mod_base = OTHER; note = uracil
  modified_base 44..45: mod_base = OTHER; note = uracil
  modified_base 48: mod_base = OTHER; note = uracil
  modified_base 53: mod_base = OTHER; note = uracil
  modified_base 57: mod_base = OTHER; note = uracil
  modified_base 62..63: mod_base = OTHER; note = uracil
  modified_base 65: mod_base = OTHER; note = uracil
  modified_base 69: mod_base = OTHER; note = uracil
  modified_base 74..76: mod_base = OTHER; note = uracil
  modified_base 79..81: mod_base = OTHER; note = uracil
  modified_base 84: mod_base = OTHER; note = uracil
  modified_base 86: mod_base = OTHER; note = uracil
  modified_base 91..92: mod_base = OTHER; note = uracil
  modified_base 94: mod_base = OTHER; note = uracil
  modified_base 100: mod_base = OTHER; note = uracil
  modified_base 102..103: mod_base = OTHER; note = uracil
  modified_base 128..129: mod_base = OTHER; note = uracil
  modified_base 133..134: mod_base = OTHER; note = uracil
  modified_base 136..137: mod_base = OTHER; note = uracil
  modified_base 139: mod_base = OTHER; note = uracil
  modified_base 146: mod_base = OTHER; note = uracil
  modified_base 163: mod_base = OTHER; note = uracil
  modified_base 169: mod_base = OTHER; note = uracil
  modified_base 173..175: mod_base = OTHER; note = uracil
  modified_base 181: mod_base = OTHER; note = uracil
  modified_base 184: mod_base = OTHER; note = uracil
  modified_base 191..192: mod_base = OTHER; note = uracil
  modified_base 199: mod_base = OTHER; note = uracil
  modified_base 201..203: mod_base = OTHER; note = uracil
  modified_base 207..209: mod_base = OTHER; note = uracil
  modified_base 215..217: mod_base = OTHER; note = uracil
  modified_base 220: mod_base = OTHER; note = uracil
  modified_base 224..225: mod_base = OTHER; note = uracil
  modified_base 235..236: mod_base = OTHER; note = uracil
  modified_base 238: mod_base = OTHER; note = uracil
  modified_base 240: mod_base = OTHER; note = uracil
  modified_base 249: mod_base = OTHER; note = uracil
  modified_base 259..260: mod_base = OTHER; note = uracil
  modified_base 267: mod_base = OTHER; note = uracil
  modified_base 270: mod_base = OTHER; note = uracil
  modified_base 274: mod_base = OTHER; note = uracil
  modified_base 280..281: mod_base = OTHER; note = uracil
  modified_base 283: mod_base = OTHER; note = uracil
  modified_base 35: mod_base = m5c
  modified_base 140: mod_base = m5c
  modified_base 185: mod_base = m5c
  modified_base 205: mod_base = m5c
  modified_base 287: mod_base = m5c
  variation 150: note = CpG site, residue is C if methylated or T(=U) if unmethylated
  variation 182: note = CpG site, residue is C if methylated or T(=U) if unmethylated
aggagtttgtgatttagaaatggtaagtaaggttcgatttttattaataaagtaggtatgattttagataagtttttattttgttttgggttttagttttttttttagtgaggaggtgggtgagggttttgttttttttcgggaattggygatttgggaaggtagagatatttttagaattygtcggagttttgaaaatatttacgttttttgttttagtaattttgagaaaggttatattgataaagttgtgggtggttagatgatagtatttttgggttttagacgaagtgggagggg

SEQ ID NO: 242 - DNA, 300 bp, synthetic construct
  source 1..300: mol_type = other DNA
  modified_base 1..3: mod_base = OTHER; note = uracil
  modified_base 5..7: mod_base = OTHER; note = uracil
  modified_base 9: mod_base = OTHER; note = uracil
  modified_base 15: mod_base = OTHER; note = uracil
  modified_base 21..23: mod_base = OTHER; note = uracil
  modified_base 31: mod_base = OTHER; note = uracil
  modified_base 35: mod_base = OTHER; note = uracil
  modified_base 38: mod_base = OTHER; note = uracil
  modified_base 42..43: mod_base = OTHER; note = uracil
  modified_base 45..47: mod_base = OTHER; note = uracil
  modified_base 49: mod_base = OTHER; note = uracil
  modified_base 52: mod_base = OTHER; note = uracil
  modified_base 58: mod_base = OTHER; note = uracil
  modified_base 66..67: mod_base = OTHER; note = uracil
  modified_base 71: mod_base = OTHER; note = uracil
  modified_base 73: mod_base = OTHER; note = uracil
  modified_base 81: mod_base = OTHER; note = uracil
  modified_base 87: mod_base = OTHER; note = uracil
  modified_base 106: mod_base = OTHER; note = uracil
  modified_base 111: mod_base = OTHER; note = uracil
  modified_base 113: mod_base = OTHER; note = uracil
  modified_base 123: mod_base = OTHER; note = uracil
  modified_base 133: mod_base = OTHER; note = uracil
  modified_base 135: mod_base = OTHER; note = uracil
  modified_base 138..139: mod_base = OTHER; note = uracil
  modified_base 142..144: mod_base = OTHER; note = uracil
  modified_base 151..152: mod_base = OTHER; note = uracil
  modified_base 157..158: mod_base = OTHER; note = uracil
  modified_base 169: mod_base = OTHER; note = uracil
  modified_base 174..176: mod_base = OTHER; note = uracil
  modified_base 178: mod_base = OTHER; note = uracil
  modified_base 180..182: mod_base = OTHER; note = uracil
  modified_base 184..185: mod_base = OTHER; note = uracil
  modified_base 187..188: mod_base = OTHER; note = uracil
  modified_base 190: mod_base = OTHER; note = uracil
  modified_base 192: mod_base = OTHER; note = uracil
  modified_base 204: mod_base = OTHER; note = uracil
  modified_base 210..212: mod_base = OTHER; note = uracil
  modified_base 217: mod_base = OTHER; note = uracil
  modified_base 228: mod_base = OTHER; note = uracil
  modified_base 233: mod_base = OTHER; note = uracil
  modified_base 240: mod_base = OTHER; note = uracil
  modified_base 244..245: mod_base = OTHER; note = uracil
  modified_base 248: mod_base = OTHER; note = uracil
  modified_base 268..269: mod_base = OTHER; note = uracil
  modified_base 273: mod_base = OTHER; note = uracil
  modified_base 277..278: mod_base = OTHER; note = uracil
  modified_base 283: mod_base = OTHER; note = uracil
  modified_base 289: mod_base = OTHER; note = uracil
  modified_base 291: mod_base = OTHER; note = uracil
  modified_base 295: mod_base = OTHER; note = uracil
  modified_base 297..298: mod_base = OTHER; note = uracil
  modified_base 12: mod_base = m5c
  modified_base 94: mod_base = m5c
  modified_base 114: mod_base = m5c
  modified_base 159: mod_base = m5c
  modified_base 264: mod_base = m5c
  variation 117: note = CpG site, residue is C if methylated or T(=U) if unmethylated
  variation 149: note = CpG site, residue is C if methylated or T(=U) if unmethylated
tttttttatttcgtttgaggtttaagaatgttgttatttggttatttatagttttattagtgtggttttttttaggattgttgggataaagggcgtgggtgtttttaggatttcggyggattttgggaatgtttttgtttttttaaatygttagttttcggaggaggataggatttttatttatttttttattaaaggagaaattgaggtttagagtagggtagggatttgtttgaggttatgtttgttttgttggtgagaatcggattttatttattatttttgggttataggtttttt

SEQ ID NO: 243 - DNA, 300 bp, synthetic construct
  source 1..300: mol_type = other DNA
  modified_base 3..5: mod_base = OTHER; note = uracil
  modified_base 9: mod_base = OTHER; note = uracil
  modified_base 16..21: mod_base = OTHER; note = uracil
  modified_base 23: mod_base = OTHER; note = uracil
  modified_base 26..28: mod_base = OTHER; note = uracil
  modified_base 32: mod_base = OTHER; note = uracil
  modified_base 40..42: mod_base = OTHER; note = uracil
  modified_base 62: mod_base = OTHER; note = uracil
  modified_base 64..65: mod_base = OTHER; note = uracil
  modified_base 67..68: mod_base = OTHER; note = uracil
  modified_base 71: mod_base = OTHER; note = uracil
  modified_base 73: mod_base = OTHER; note = uracil
  modified_base 78: mod_base = OTHER; note = uracil
  modified_base 84: mod_base = OTHER; note = uracil
  modified_base 94: mod_base = OTHER; note = uracil
  modified_base 96: mod_base = OTHER; note = uracil
  modified_base 101..103: mod_base = OTHER; note = uracil
  modified_base 119: mod_base = OTHER; note = uracil
  modified_base 124..125: mod_base = OTHER; note = uracil
  modified_base 131..132: mod_base = OTHER; note = uracil
  modified_base 136: mod_base = OTHER; note = uracil
  modified_base 145..146: mod_base = OTHER; note = uracil
  modified_base 149: mod_base = OTHER; note = uracil
  modified_base 154: mod_base = OTHER; note = uracil
  modified_base 156: mod_base = OTHER; note = uracil
  modified_base 158: mod_base = OTHER; note = uracil
  modified_base 160: mod_base = OTHER; note = uracil
  modified_base 162: mod_base = OTHER; note = uracil
  modified_base 166: mod_base = OTHER; note = uracil
  modified_base 168..169: mod_base = OTHER; note = uracil
  modified_base 172: mod_base = OTHER; note = uracil
  modified_base 175: mod_base = OTHER; note = uracil
  modified_base 177..178: mod_base = OTHER; note = uracil
  modified_base 184: mod_base = OTHER; note = uracil
  modified_base 190: mod_base = OTHER; note = uracil
  modified_base 192..193: mod_base = OTHER; note = uracil
  modified_base 195..196: mod_base = OTHER; note = uracil
  modified_base 203: mod_base = OTHER; note = uracil
  modified_base 205: mod_base = OTHER; note = uracil
  modified_base 208: mod_base = OTHER; note = uracil
  modified_base 211: mod_base = OTHER; note = uracil
  modified_base 213: mod_base = OTHER; note = uracil
  modified_base 216: mod_base = OTHER; note = uracil
  modified_base 219..220: mod_base = OTHER; note = uracil
  modified_base 222..223: mod_base = OTHER; note = uracil
  modified_base 225: mod_base = OTHER; note = uracil
  modified_base 228..229: mod_base = OTHER; note = uracil
  modified_base 232: mod_base = OTHER; note = uracil
  modified_base 235: mod_base = OTHER; note = uracil
  modified_base 238..239: mod_base = OTHER; note = uracil
  modified_base 247: mod_base = OTHER; note = uracil
  modified_base 249..250: mod_base = OTHER; note = uracil
  modified_base 252: mod_base = OTHER; note = uracil
  modified_base 255: mod_base = OTHER; note = uracil
  modified_base 259: mod_base = OTHER; note = uracil
  modified_base 267..269: mod_base = OTHER; note = uracil
  modified_base 271..272: mod_base = OTHER; note = uracil
  modified_base 274: mod_base = OTHER; note = uracil
  modified_base 279..280: mod_base = OTHER; note = uracil
  modified_base 282: mod_base = OTHER; note = uracil
  modified_base 288: mod_base = OTHER; note = uracil
  modified_base 293..294: mod_base = OTHER; note = uracil
  modified_base 297: mod_base = OTHER; note = uracil
  modified_base 34: mod_base = m5c
  modified_base 126: mod_base = m5c
  modified_base 179: mod_base = m5c
  modified_base 199: mod_base = m5c
  modified_base 209: mod_base = m5c
  modified_base 217: mod_base = m5c
  modified_base 230: mod_base = m5c
  modified_base 233: mod_base = m5c
  modified_base 283: mod_base = m5c
  modified_base 291: mod_base = m5c
  variation 150: note = CpG site, residue is C if methylated or T(=U) if unmethylated
agttttggttgagtgttttttatttttttggttcgagttttttgaggaaaaaaggtggtgattttttttgtatagaataaaggttgagtgaggtatagtgtttaggggatgaggaaggttgagttcgggattaggtaggaggaatttgtygtgtatttatttagatttttgtagtattcggggtaggtgttttattagcgggtatagtcgtttagtcgtttttttatttcgtcgtagttagtggattattatagttgttagagaggtttattatttggttatcgggtttacgtttgtaga

SEQ ID NO: 244 - DNA, 300 bp, synthetic construct
  source 1..300: mol_type = other DNA
  modified_base 2: mod_base = OTHER; note = uracil
  modified_base 5: mod_base = OTHER; note = uracil
  modified_base 15..16: mod_base = OTHER; note = uracil
  modified_base 23..24: mod_base = OTHER; note = uracil
  modified_base 35..36: mod_base = OTHER; note = uracil
  modified_base 38: mod_base = OTHER; note = uracil
  modified_base 40: mod_base = OTHER; note = uracil
  modified_base 44: mod_base = OTHER; note = uracil
  modified_base 47: mod_base = OTHER; note = uracil
  modified_base 57..58: mod_base = OTHER; note = uracil
  modified_base 60: mod_base = OTHER; note = uracil
  modified_base 64: mod_base = OTHER; note = uracil
  modified_base 86: mod_base = OTHER; note = uracil
  modified_base 94: mod_base = OTHER; note = uracil
  modified_base 99..100: mod_base = OTHER; note = uracil
  modified_base 103: mod_base = OTHER; note = uracil
  modified_base 112: mod_base = OTHER; note = uracil
  modified_base 114..115: mod_base = OTHER; note = uracil
  modified_base 118..120: mod_base = OTHER; note = uracil
  modified_base 127: mod_base = OTHER; note = uracil
  modified_base 130: mod_base = OTHER; note = uracil
  modified_base 137: mod_base = OTHER; note = uracil
  modified_base 148: mod_base = OTHER; note = uracil
  modified_base 153: mod_base = OTHER; note = uracil
  modified_base 159..160: mod_base = OTHER; note = uracil
  modified_base 162..163: mod_base = OTHER; note = uracil
  modified_base 166..167: mod_base = OTHER; note = uracil
  modified_base 172..173: mod_base = OTHER; note = uracil
  modified_base 178: mod_base = OTHER; note = uracil
  modified_base 180: mod_base = OTHER; note = uracil
  modified_base 183..184: mod_base = OTHER; note = uracil
  modified_base 187..188: mod_base = OTHER; note = uracil
  modified_base 190: mod_base = OTHER; note = uracil
  modified_base 193..196: mod_base = OTHER; note = uracil
  modified_base 201: mod_base = OTHER; note = uracil
  modified_base 203: mod_base = OTHER; note = uracil
  modified_base 208..209: mod_base = OTHER; note = uracil
  modified_base 211: mod_base = OTHER; note = uracil
  modified_base 213: mod_base = OTHER; note = uracil
  modified_base 215: mod_base = OTHER; note = uracil
  modified_base 218..219: mod_base = OTHER; note = uracil
  modified_base 226: mod_base = OTHER; note = uracil
  modified_base 231: mod_base = OTHER; note = uracil
  modified_base 241: mod_base = OTHER; note = uracil
  modified_base 243..244: mod_base = OTHER; note = uracil
  modified_base 246..247: mod_base = OTHER; note = uracil
  modified_base 254..255: mod_base = OTHER; note = uracil
  modified_base 257: mod_base = OTHER; note = uracil
  modified_base 264: mod_base = OTHER; note = uracil
  modified_base 270..271: mod_base = OTHER; note = uracil
  modified_base 286: mod_base = OTHER; note = uracil
  modified_base 288: mod_base = OTHER; note = uracil
  modified_base 290: mod_base = OTHER; note = uracil
  modified_base 293..294: mod_base = OTHER; note = uracil
  modified_base 299: mod_base = OTHER; note = uracil
  modified_base 9: mod_base = m5c
  modified_base 17: mod_base = m5c
  modified_base 67: mod_base = m5c
  modified_base 70: mod_base = m5c
  modified_base 83: mod_base = m5c
  modified_base 91: mod_base = m5c
  modified_base 101: mod_base = m5c
  modified_base 121: mod_base = m5c
  modified_base 174: mod_base = m5c
  modified_base 266: mod_base = m5c
  variation 150: note = CpG site, residue is C if methylated or T(=U) if unmethylated
tttgtaggcgtagattcggtggttaagtggtgggtttttttgatagttgtggtgatttattggttgcggcgggatgaggaggcggttgagcggttgtgttcgttggtggagtatttgtttcgggtgttgtaggagtttgagtgagtgtayggtaggttttttttgtttggtttcgggtttagttttttttattttttgggtattgtgttttatttagtttttgttttgtgtaggaggagttattattttttttttttagggaattcgagttagggaagtggggggtatttagttagggtt

SEQ ID NO: 245 - DNA, 300 bp, synthetic construct
  source 1..300: mol_type = other DNA
  modified_base 1: mod_base = OTHER; note = uracil
  modified_base 3: mod_base = OTHER; note = uracil
  modified_base 8: mod_base = OTHER; note = uracil
  modified_base 10: mod_base = OTHER; note = uracil
  modified_base 12: mod_base = OTHER; note = uracil
  modified_base 14..15: mod_base = OTHER; note = uracil
  modified_base 17: mod_base = OTHER; note = uracil
  modified_base 28..29: mod_base = OTHER; note = uracil
  modified_base 34: mod_base = OTHER; note = uracil
  modified_base 39: mod_base = OTHER; note = uracil
  modified_base 41: mod_base = OTHER; note = uracil
  modified_base 47..48: mod_base = OTHER; note = uracil
  modified_base 51: mod_base = OTHER; note = uracil
  modified_base 60..61: mod_base = OTHER; note = uracil
  modified_base 65..66: mod_base = OTHER; note = uracil
  modified_base 77: mod_base = OTHER; note = uracil
  modified_base 79: mod_base = OTHER; note = uracil
  modified_base 85: mod_base = OTHER; note = uracil
  modified_base 87: mod_base = OTHER; note = uracil
  modified_base 91: mod_base = OTHER; note = uracil
  modified_base 96..99: mod_base = OTHER; note = uracil
  modified_base 102: mod_base = OTHER; note = uracil
  modified_base 105: mod_base = OTHER; note = uracil
  modified_base 109..111: mod_base = OTHER; note = uracil
  modified_base 116: mod_base = OTHER; note = uracil
  modified_base 127: mod_base = OTHER; note = uracil
  modified_base 133: mod_base = OTHER; note = uracil
  modified_base 135: mod_base = OTHER; note = uracil
  modified_base 137: mod_base = OTHER; note = uracil
  modified_base 142: mod_base = OTHER; note = uracil
  modified_base 147: mod_base = OTHER; note = uracil
  modified_base 151: mod_base = OTHER; note = uracil
  modified_base 153: mod_base = OTHER; note = uracil
  modified_base 165..166: mod_base = OTHER; note = uracil
  modified_base 175: mod_base = OTHER; note = uracil
  modified_base 181: mod_base = OTHER; note = uracil
  modified_base 183..184: mod_base = OTHER; note = uracil
  modified_base 189..190: mod_base = OTHER; note = uracil
  modified_base 198..199: mod_base = OTHER; note = uracil
  modified_base 201: mod_base = OTHER; note = uracil
  modified_base 234: mod_base = OTHER; note = uracil
  modified_base 239..242: mod_base = OTHER; note = uracil
  modified_base 244..246: mod_base = OTHER; note = uracil
  modified_base 248..249: mod_base = OTHER; note = uracil
  modified_base 251: mod_base = OTHER; note = uracil
  modified_base 253..254: mod_base = OTHER; note = uracil
  modified_base 258: mod_base = OTHER; note = uracil
  modified_base 265: mod_base = OTHER; note = uracil
  modified_base 271..272: mod_base = OTHER; note = uracil
  modified_base 281: mod_base = OTHER; note = uracil
  modified_base 287..288: mod_base = OTHER; note = uracil
  modified_base 290: mod_base = OTHER; note = uracil
  modified_base 292..293: mod_base = OTHER; note = uracil
  modified_base 299..300: mod_base = OTHER; note = uracil
  modified_base 49: mod_base = m5c
  modified_base 52: mod_base = m5c
  modified_base 82: mod_base = m5c
  modified_base 167: mod_base = m5c
  variation 149: note = CpG site, residue is C if methylated or T(=U) if unmethylated
ttttgggttttttttatagggttgaggttagagttatttttagaatttcgtcggaggggttttgtttggaggagggtataacgatatttatttgtttttattagttgatttagggttggggttgggttgggttatatagtttagtgttygttttaagagatgttttcggaatagttgagttatttgggttagggggtttattgtggagaggaggaggtgagtggggtggggagtagggttttatttttttttttaagttaagggtttttttttgggtgggttggggttatatttagggtt

SEQ ID NO: 246 - DNA, 300 bp, synthetic construct
  source 1..300: mol_type = other DNA
  modified_base 2..4: mod_base = OTHER; note = uracil
  modified_base 14..17: mod_base = OTHER; note = uracil
  modified_base 20..22: mod_base = OTHER; note = uracil
  modified_base 24..26: mod_base = OTHER; note = uracil
  modified_base 36..38: mod_base = OTHER; note = uracil
  modified_base 43: mod_base = OTHER; note = uracil
  modified_base 62..64: mod_base = OTHER; note = uracil
  modified_base 67: mod_base = OTHER; note = uracil
  modified_base 69..72: mod_base = OTHER; note = uracil
  modified_base 74..77: mod_base = OTHER; note = uracil
  modified_base 79: mod_base = OTHER; note = uracil
  modified_base 81: mod_base = OTHER; note = uracil
  modified_base 83..84: mod_base = OTHER; note = uracil
  modified_base 86..87: mod_base = OTHER; note = uracil
  modified_base 89..90: mod_base = OTHER; note = uracil
  modified_base 92: mod_base = OTHER; note = uracil
  modified_base 94..95: mod_base = OTHER; note = uracil
  modified_base 97: mod_base = OTHER; note = uracil
  modified_base 104..108: mod_base = OTHER; note = uracil
  modified_base 112..114: mod_base = OTHER; note = uracil
  modified_base 121: mod_base = OTHER; note = uracil
  modified_base 123: mod_base = OTHER; note = uracil
  modified_base 126: mod_base = OTHER; note = uracil
  modified_base 131: mod_base = OTHER; note = uracil
  modified_base 138: mod_base = OTHER; note = uracil
  modified_base 141: mod_base = OTHER; note = uracil
  modified_base 143: mod_base = OTHER; note = uracil
  modified_base 154: mod_base = OTHER; note = uracil
  modified_base 156: mod_base = OTHER; note = uracil
  modified_base 161: mod_base = OTHER; note = uracil
  modified_base 169..171: mod_base = OTHER; note = uracil
  modified_base 174..176: mod_base = OTHER; note = uracil
  modified_base 179..182: mod_base = OTHER; note = uracil
  modified_base 185..187: mod_base = OTHER; note = uracil
  modified_base 193: mod_base = OTHER; note = uracil
  modified_base 196: mod_base = OTHER; note = uracil
  modified_base 206: mod_base = OTHER; note = uracil
  modified_base 224..226: mod_base = OTHER; note = uracil
  modified_base 228..229: mod_base = OTHER; note = uracil
  modified_base 231..232: mod_base = OTHER; note = uracil
  modified_base 236: mod_base = OTHER; note = uracil
  modified_base 241..244: mod_base = OTHER; note = uracil
  modified_base 246: mod_base = OTHER; note = uracil
  modified_base 257: mod_base = OTHER; note = uracil
  modified_base 267: mod_base = OTHER; note = uracil
  modified_base 269: mod_base = OTHER; note = uracil
  modified_base 273..274: mod_base = OTHER; note = uracil
  modified_base 276: mod_base = OTHER; note = uracil
  modified_base 279..281: mod_base = OTHER; note = uracil
  modified_base 293..295: mod_base = OTHER; note = uracil
  modified_base 300: mod_base = OTHER; note = uracil
  modified_base 132: mod_base = m5c
  modified_base 217: mod_base = m5c
  modified_base 247: mod_base = m5c
  modified_base 250: mod_base = m5c
  variation 150: note = CpG site, residue is C if methylated or T(=U) if unmethylated
gttttaggtgtggttttagtttatttaggaaaaagtttttagtttggagaggagggtggggttttgttttttattttatttatttttttttttttatagtggattttttggtttaggtgatttagttatttcgggaatattttttagagygagtattgaattgtgtgatttagtttaattttagttttgggttagttgatggggataagtaagtgtcgttgtgtttttttttaggtaaggttttttcggcgggattttgagaatagttttggttttaattttgtggagagagtttagagt

SEQ ID NO: 247 - DNA, 300 bp, synthetic construct
  source 1..300: mol_type = other DNA
  modified_base 3..5: mod_base = OTHER; note = uracil
  modified_base 9: mod_base = OTHER; note = uracil
  modified_base 11: mod_base = OTHER; note = uracil
  modified_base 16: mod_base = OTHER; note = uracil
  modified_base 20: mod_base = OTHER; note = uracil
  modified_base 22..23: mod_base = OTHER; note = uracil
  modified_base 25: mod_base = OTHER; note = uracil
  modified_base 28..29: mod_base = OTHER; note = uracil
  modified_base 35..37: mod_base = OTHER; note = uracil
  modified_base 40: mod_base = OTHER; note = uracil
  modified_base 46: mod_base = OTHER; note = uracil
  modified_base 48: mod_base = OTHER; note = uracil
  modified_base 51: mod_base = OTHER; note = uracil
  modified_base 54: mod_base = OTHER; note = uracil
  modified_base 60..62: mod_base = OTHER; note = uracil
  modified_base 67: mod_base = OTHER; note = uracil
  modified_base 72..74: mod_base = OTHER; note = uracil
  modified_base 84: mod_base = OTHER; note = uracil
  modified_base 87: mod_base = OTHER; note = uracil
  modified_base 89..90: mod_base = OTHER; note = uracil
  modified_base 93..96: mod_base = OTHER; note = uracil
  modified_base 99..103: mod_base = OTHER; note = uracil
  modified_base 105..107: mod_base = OTHER; note = uracil
  modified_base 110: mod_base = OTHER; note = uracil
  modified_base 114: mod_base = OTHER; note = uracil
  modified_base 116..117: mod_base = OTHER; note = uracil
  modified_base 121..122: mod_base = OTHER; note = uracil
  modified_base 124: mod_base = OTHER; note = uracil
  modified_base 131: mod_base = OTHER; note = uracil
  modified_base 134..135: mod_base = OTHER; note = uracil
  modified_base 138: mod_base = OTHER; note = uracil
  modified_base 140..141: mod_base = OTHER; note = uracil
  modified_base 143..144: mod_base = OTHER; note = uracil
  modified_base 146..147: mod_base = OTHER; note = uracil
  modified_base 155: mod_base = OTHER; note = uracil
  modified_base 158..159: mod_base = OTHER; note = uracil
  modified_base 165..168: mod_base = OTHER; note = uracil
  modified_base 172: mod_base = OTHER; note = uracil
  modified_base 175: mod_base = OTHER; note = uracil
  modified_base 177..178: mod_base = OTHER; note = uracil
  modified_base 180..183: mod_base = OTHER; note = uracil
  modified_base 191..194: mod_base = OTHER; note = uracil
  modified_base 198: mod_base = OTHER; note = uracil
  modified_base 200: mod_base = OTHER; note = uracil
  modified_base 205: mod_base = OTHER; note = uracil
  modified_base 211: mod_base = OTHER; note = uracil
  modified_base 214..215: mod_base = OTHER; note = uracil
  modified_base 219: mod_base = OTHER; note = uracil
  modified_base 221: mod_base = OTHER; note = uracil
  modified_base 227: mod_base = OTHER; note = uracil
  modified_base 229..230: mod_base = OTHER; note = uracil
  modified_base 232: mod_base = OTHER; note = uracil
  modified_base 239: mod_base = OTHER; note = uracil
  modified_base 242: mod_base = OTHER; note = uracil
  modified_base 244..245: mod_base = OTHER; note = uracil
  modified_base 250: mod_base = OTHER; note = uracil
  modified_base 254: mod_base = OTHER; note = uracil
  modified_base 259..263: mod_base = OTHER; note = uracil
  modified_base 269..270: mod_base = OTHER; note = uracil
  modified_base 272: mod_base = OTHER; note = uracil
  modified_base 277: mod_base = OTHER; note = uracil
  modified_base 279: mod_base = OTHER; note = uracil
  modified_base 282: mod_base = OTHER; note = uracil
  modified_base 287..291: mod_base = OTHER; note = uracil
  modified_base 296..297: mod_base = OTHER; note = uracil
  modified_base 299..300: mod_base = OTHER; note = uracil
  modified_base 1: mod_base = m5c
  modified_base 26: mod_base = m5c
  modified_base 70: mod_base = m5c
  modified_base 118: mod_base = m5c
  modified_base 184: mod_base = m5c
  variation 150: note = CpG site, residue is C if methylated or T(=U) if unmethylated
cgttttggttttgggtttttattatcgtttggggttttgtttggattttgtagttgtgttttaaggttgcgttttagatttgtttatttttttttttgttttttttttgttttttttcggtttttgtagtttttttgtttttttatttaygtggttgttttgggttttatgtagtttttttttcgggatgttttatgttttgttttgtgattgttttatttttgattatttttgatggttgttttagtgtaggtagaatttttaaagttttttgttttttatatgtttttttttgttatt

SEQ ID NO: 248 - DNA, 300 bp, synthetic construct
  source 1..300: mol_type = other DNA
  modified_base 6: mod_base = OTHER; note = uracil
  modified_base 16: mod_base = OTHER; note = uracil
  modified_base 27: mod_base = OTHER; note = uracil
  modified_base 34: mod_base = OTHER; note = uracil
  modified_base 45: mod_base = OTHER; note = uracil
  modified_base 48..49: mod_base = OTHER; note = uracil
  modified_base 52: mod_base = OTHER; note = uracil
  modified_base 54: mod_base = OTHER; note = uracil
  modified_base 60: mod_base = OTHER; note = uracil
  modified_base 63..64: mod_base = OTHER; note = uracil
  modified_base 67: mod_base = OTHER; note = uracil
  modified_base 77: mod_base = OTHER; note = uracil
  modified_base 88: mod_base = OTHER; note = uracil
  modified_base 92: mod_base = OTHER; note = uracil
  modified_base 94: mod_base = OTHER; note = uracil
  modified_base 99: mod_base = OTHER; note = uracil
  modified_base 104: mod_base = OTHER; note = uracil
  modified_base 111: mod_base = OTHER; note = uracil
  modified_base 114..115: mod_base = OTHER; note = uracil
  modified_base 127: mod_base = OTHER; note = uracil
  modified_base 130: mod_base = OTHER; note = uracil
  modified_base 137..139: mod_base = OTHER; note = uracil
  modified_base 144: mod_base = OTHER; note = uracil
  modified_base 147..148: mod_base = OTHER; note = uracil
  modified_base 164: mod_base = OTHER; note = uracil
  modified_base 172: mod_base = OTHER; note = uracil
  modified_base 175: mod_base = OTHER; note = uracil
  modified_base 181: mod_base = OTHER; note = uracil
  modified_base 192: mod_base = OTHER; note = uracil
  modified_base 203: mod_base = OTHER; note = uracil
  modified_base 219: mod_base = OTHER; note = uracil
  modified_base 224: mod_base = OTHER; note = uracil
  modified_base 232: mod_base = OTHER; note = uracil
  modified_base 235..236: mod_base = OTHER; note = uracil
  modified_base 243: mod_base = OTHER; note = uracil
  modified_base 245: mod_base = OTHER; note = uracil
  modified_base 248: mod_base = OTHER; note = uracil
  modified_base 251: mod_base = OTHER; note = uracil
  modified_base 257..258: mod_base = OTHER; note = uracil
  modified_base 262: mod_base = OTHER; note = uracil
  modified_base 267..270: mod_base = OTHER; note = uracil
  modified_base 286..288: mod_base = OTHER; note = uracil
  modified_base 293..294: mod_base = OTHER; note = uracil
  modified_base 116: mod_base = m5c
  modified_base 182: mod_base = m5c
  modified_base 230: mod_base = m5c
  modified_base 274: mod_base = m5c
  modified_base 299: mod_base = m5c
  variation 150: note = CpG site, residue is C if methylated or T(=U) if unmethylated
ggtggtaaagggggatatgtagagaatagaggattttgggggttttgtttgtattggagtagttattagaggtgattaagagtaaggtagttatagaatagagtatggggtatttcgggggaggagttgtatggggtttaaggtagttaygtaggtggaggagtaggaagattatagaggtcgggagaaagtagggagggggtaggggaaggagtagataaatttagggcgtagttttgggatatagttgtagagtttaagtagggttttaggcggtggtgaaagtttagagttagggcg

SEQ ID NO: 249 - DNA, 300 bp, synthetic construct
  source 1..300: mol_type = other DNA
  modified_base 4..5: mod_base = OTHER; note = uracil
  modified_base 7..8: mod_base = OTHER; note = uracil
  modified_base 10: mod_base = OTHER; note = uracil
  modified_base 12: mod_base = OTHER; note = uracil
  modified_base 16..17: mod_base = OTHER; note = uracil
  modified_base 20..21: mod_base = OTHER; note = uracil
  modified_base 24: mod_base = OTHER; note = uracil
  modified_base 26..27: mod_base = OTHER; note = uracil
  modified_base 32..33: mod_base = OTHER; note = uracil
  modified_base 35..37: mod_base = OTHER; note = uracil
  modified_base 42..43: mod_base = OTHER; note = uracil
  modified_base 45..46: mod_base = OTHER; note = uracil
  modified_base 49: mod_base = OTHER; note = uracil
  modified_base 51: mod_base = OTHER; note = uracil
  modified_base 66..68: mod_base = OTHER; note = uracil
  modified_base 70: mod_base = OTHER; note = uracil
  modified_base 80: mod_base = OTHER; note = uracil
  modified_base 83..84: mod_base = OTHER; note = uracil
  modified_base 86: mod_base = OTHER; note = uracil
  modified_base 89: mod_base = OTHER; note = uracil
  modified_base 91..92: mod_base = OTHER; note = uracil
  modified_base 94: mod_base = OTHER; note = uracil
  modified_base 96: mod_base = OTHER; note = uracil
  modified_base 104: mod_base = OTHER; note = uracil
  modified_base 109: mod_base = OTHER; note = uracil
  modified_base 112..113: mod_base = OTHER; note = uracil
  modified_base 115..116: mod_base = OTHER; note = uracil
  modified_base 118..119: mod_base = OTHER; note = uracil
  modified_base 124..125: mod_base = OTHER; note = uracil
  modified_base 132: mod_base = OTHER; note = uracil
  modified_base 135: mod_base = OTHER; note = uracil
  modified_base 141: mod_base = OTHER; note = uracil
  modified_base 143..144: mod_base = OTHER; note = uracil
  modified_base 146..147: mod_base = OTHER; note = uracil
  modified_base 156: mod_base = OTHER; note = uracil
  modified_base 159: mod_base = OTHER; note = uracil
  modified_base 161: mod_base = OTHER; note = uracil
  modified_base 163: mod_base = OTHER; note = uracil
  modified_base 165: mod_base = OTHER; note = uracil
  modified_base 169: mod_base = OTHER; note = uracil
  modified_base 173: mod_base = OTHER; note = uracil
  modified_base 175: mod_base = OTHER; note = uracil
  modified_base 182: mod_base = OTHER; note = uracil
  modified_base 193..194: mod_base = OTHER; note = uracil
  modified_base 198: mod_base = OTHER; note = uracil
  modified_base 241: mod_base = OTHER; note = uracil
  modified_base 252: mod_base = OTHER; note = uracil
  modified_base 259: mod_base = OTHER; note = uracil
  modified_base 263..264: mod_base = OTHER; note = uracil
  modified_base 269..272: mod_base = OTHER; note = uracil
  modified_base 274..275: mod_base = OTHER; note = uracil
  modified_base 283: mod_base = OTHER; note = uracil
  modified_base 285..286: mod_base = OTHER; note = uracil
  modified_base 289..292: mod_base = OTHER; note = uracil
  modified_base 295: mod_base = OTHER; note = uracil
  modified_base 298: mod_base = OTHER; note = uracil
  modified_base 120: mod_base = m5c
  modified_base 183: mod_base = m5c
  modified_base 296: mod_base = m5c
  variation 150: note = CpG site, residue is C if methylated or T(=U) if unmethylated
tttttttttttttttttttttttttttagttttttttttttttttttttattgtttgatttttagttttttgatttttttttttttttttttattttttatttttttttatttttttttcggtttttttttttgttttgttatttttttygtttttttttttttttggttgatttaggggatcggaggtgggtttatttggagtgagtgagtaagtgtgttgggaggtgagggtggagggttggaggggggtagtgatttggtttgagtttttttagtattgttttagttttagtcgtag

SEQ ID NO: 250 - DNA, 300 bp, synthetic construct
  source 1..300: mol_type = other DNA
  modified_base 1: mod_base = OTHER; note = uracil
  modified_base 7: mod_base = OTHER; note = uracil
  modified_base 13: mod_base = OTHER; note = uracil
  modified_base 19: mod_base = OTHER; note = uracil
  modified_base 24: mod_base = OTHER; note = uracil
  modified_base 33: mod_base = OTHER; note = uracil
  modified_base 35: mod_base = OTHER; note = uracil
  modified_base 39..40: mod_base = OTHER; note = uracil
  modified_base 45: mod_base = OTHER; note = uracil
  modified_base 47: mod_base = OTHER; note = uracil
  modified_base 50..55: mod_base = OTHER; note = uracil
  modified_base 57..58: mod_base = OTHER; note = uracil
  modified_base 61..63: mod_base = OTHER; note = uracil
  modified_base 65..66: mod_base = OTHER; note = uracil
  modified_base 68..70: mod_base = OTHER; note = uracil
  modified_base 72: mod_base = OTHER; note = uracil
  modified_base 74..75: mod_base = OTHER; note = uracil
  modified_base 77..79: mod_base = OTHER; note = uracil
  modified_base 82: mod_base = OTHER; note = uracil
  modified_base 84: mod_base = OTHER; note = uracil
  modified_base 86: mod_base = OTHER; note = uracil
  modified_base 90: mod_base = OTHER; note = uracil
  modified_base 92: mod_base = OTHER; note = uracil
  modified_base 94: mod_base = OTHER; note = uracil
  modified_base 96: mod_base = OTHER; note = uracil
  modified_base 98: mod_base = OTHER; note = uracil
  modified_base 100..101: mod_base = OTHER; note = uracil
  modified_base 109..111: mod_base = OTHER; note = uracil
  modified_base 113..114: mod_base = OTHER; note = uracil
  modified_base 116: mod_base = OTHER; note = uracil
  modified_base 121..124: mod_base = OTHER; note = uracil
  modified_base 130: mod_base = OTHER; note = uracil
  modified_base 133..134: mod_base = OTHER; note = uracil
  modified_base 162: mod_base = OTHER; note = uracil
  modified_base 167: mod_base = OTHER; note = uracil
  modified_base 179: mod_base = OTHER; note = uracil
  modified_base 229: mod_base = OTHER; note = uracil
  modified_base 236: mod_base = OTHER; note = uracil
  modified_base 244: mod_base = OTHER; note = uracil
  modified_base 248: mod_base = OTHER; note = uracil
  modified_base 272: mod_base = OTHER; note = uracil
  modified_base 4: mod_base = m5c
  modified_base 117: mod_base = m5c
  modified_base 180: mod_base = m5c
  variation 150: note = CpG site, residue is C if methylated or T(=U) if unmethylated
ttgcggttggggttggagtaatattggaggggtttaggttagattattgtttttttttagttttttatttttattttttaatatatttatttatttattttagataggtttattttcggttttttgagttagttagagagagaagaaaaygaaggaggtgataaagtagaaaaaaggatcgggaggaggatgaaaagaaataaagagtggagaagaggaagaaaaaattagagggttaaaaattaaatagtgaaggaggaaaagggaggaattggagaaggaaggaaagagaggaggaaa

SEQ ID NO: 251 - DNA, 300 bp, synthetic construct
  source 1..300: mol_type = other DNA
  modified_base 1: mod_base = OTHER; note = uracil
  modified_base 6: mod_base = OTHER; note = uracil
  modified_base 8: mod_base = OTHER; note = uracil
  modified_base 10: mod_base = OTHER; note = uracil
  modified_base 14..16: mod_base = OTHER; note = uracil
  modified_base 20..21: mod_base = OTHER; note = uracil
  modified_base 30: mod_base = OTHER; note = uracil
  modified_base 33: mod_base = OTHER; note = uracil
  modified_base 36..41: mod_base = OTHER; note = uracil
  modified_base 43: mod_base = OTHER; note = uracil
  modified_base 45: mod_base = OTHER; note = uracil
  modified_base 48..51: mod_base = OTHER; note = uracil
  modified_base 55: mod_base = OTHER; note = uracil
  modified_base 57: mod_base = OTHER; note = uracil
  modified_base 62..64: mod_base = OTHER; note = uracil
  modified_base 71: mod_base = OTHER; note = uracil
  modified_base 75..76: mod_base = OTHER; note = uracil
  modified_base 80: mod_base = OTHER; note = uracil
  modified_base 83: mod_base = OTHER; note = uracil
  modified_base 86: mod_base = OTHER; note = uracil
  modified_base 93: mod_base = OTHER; note = uracil
  modified_base 95..96: mod_base = OTHER; note = uracil
  modified_base 101: mod_base = OTHER; note = uracil
  modified_base 111..112: mod_base = OTHER; note = uracil
  modified_base 118..119: mod_base = OTHER; note = uracil
  modified_base 121..122: mod_base = OTHER; note = uracil
  modified_base 124: mod_base = OTHER; note = uracil
  modified_base 130: mod_base = OTHER; note = uracil
  modified_base 132..133: mod_base = OTHER; note = uracil
  modified_base 145..146: mod_base = OTHER; note = uracil
  modified_base 161: mod_base = OTHER; note = uracil
  modified_base 163: mod_base = OTHER; note = uracil
  modified_base 167: mod_base = OTHER; note = uracil
  modified_base 171..174: mod_base = OTHER; note = uracil
  modified_base 177..179: mod_base = OTHER; note = uracil
  modified_base 183: mod_base = OTHER; note = uracil
  modified_base 189..191: mod_base = OTHER; note = uracil
  modified_base 196..198: mod_base = OTHER; note = uracil
  modified_base 201..204: mod_base = OTHER; note = uracil
  modified_base 208: mod_base = OTHER; note = uracil
  modified_base 211..212: mod_base = OTHER; note = uracil
  modified_base 215..217: mod_base = OTHER; note = uracil
  modified_base 224: mod_base = OTHER; note = uracil
  modified_base 229..230: mod_base = OTHER; note = uracil
  modified_base 236: mod_base = OTHER; note = uracil
  modified_base 240..241: mod_base = OTHER; note = uracil
  modified_base 246..248: mod_base = OTHER; note = uracil
  modified_base 250: mod_base = OTHER; note = uracil
  modified_base 253: mod_base = OTHER; note = uracil
  modified_base 256..257: mod_base = OTHER; note = uracil
  modified_base 266..267: mod_base = OTHER; note = uracil
  modified_base 270: mod_base = OTHER; note = uracil
  modified_base 278: mod_base = OTHER; note = uracil
  modified_base 282..283: mod_base = OTHER; note = uracil
  modified_base 288: mod_base = OTHER; note = uracil
  modified_base 290..291: mod_base = OTHER; note = uracil
  modified_base 27: mod_base = m5c
  modified_base 53: mod_base = m5c
  modified_base 81: mod_base = m5c
  modified_base 113: mod_base = m5c
  modified_base 192: mod_base = m5c
  variation 150: note = CpG site, residue is C if methylated or T(=U) if unmethylated
ttatatttttaggtttaggttaggggcggtagttgttttttttattgttttacgtataaatttttggttttagtttaaatcgttattgtgagttttagatttgggtggggttcggagtttttttattagtattaggtgggatggttttgygaagataaagttttgtttggttttagtttaggttgtagtttcgggttttgttttaggtagtttgtttaggatgttgtgttagtttttgatttttgtttattgtagttagatggggttatttgtggagttggttttttttttttagaatga

SEQ ID NO: 252 - DNA, 300 bp, synthetic construct
  source 1..300: mol_type = other DNA
  modified_base 2: mod_base = OTHER; note = uracil
  modified_base 6: mod_base = OTHER; note = uracil
  modified_base 20..21: mod_base = OTHER; note = uracil
  modified_base 24: mod_base = OTHER; note = uracil
  modified_base 26..27: mod_base = OTHER; note = uracil
  modified_base 29: mod_base = OTHER; note = uracil
  modified_base 36..39: mod_base = OTHER; note = uracil
  modified_base 42: mod_base = OTHER; note = uracil
  modified_base 46: mod_base = OTHER; note = uracil
  modified_base 49: mod_base = OTHER; note = uracil
  modified_base 56: mod_base = OTHER; note = uracil
  modified_base 63: mod_base = OTHER; note = uracil
  modified_base 69: mod_base = OTHER; note = uracil
  modified_base 73: mod_base = OTHER; note = uracil
  modified_base 75: mod_base = OTHER; note = uracil
  modified_base 78: mod_base = OTHER; note = uracil
  modified_base 81..82: mod_base = OTHER; note = uracil
  modified_base 87: mod_base = OTHER; note = uracil
  modified_base 91: mod_base = OTHER; note = uracil
  modified_base 94..95: mod_base = OTHER; note = uracil
  modified_base 101: mod_base = OTHER; note = uracil
  modified_base 106..107: mod_base = OTHER; note = uracil
  modified_base 113: mod_base = OTHER; note = uracil
  modified_base 116: mod_base = OTHER; note = uracil
  modified_base 119..120: mod_base = OTHER; note = uracil
  modified_base 125: mod_base = OTHER; note = uracil
  modified_base 131..132: mod_base = OTHER; note = uracil
  modified_base 136: mod_base = OTHER; note = uracil
  modified_base 141: mod_base = OTHER; note = uracil
  modified_base 147: mod_base = OTHER; note = uracil
  modified_base 152: mod_base = OTHER; note = uracil
  modified_base 157..158: mod_base = OTHER; note = uracil
  modified_base 161..163: mod_base = OTHER; note = uracil
  modified_base 165..166: mod_base = OTHER; note = uracil
  modified_base 172: mod_base = OTHER; note = uracil
  modified_base 184: mod_base = OTHER; note = uracil
  modified_base 186: mod_base = OTHER; note = uracil
  modified_base 191..194: mod_base = OTHER; note = uracil
  modified_base 196..198: mod_base = OTHER; note = uracil
  modified_base 203: mod_base = OTHER; note = uracil
  modified_base 209: mod_base = OTHER; note = uracil
  modified_base 211: mod_base = OTHER; note = uracil
  modified_base 213: mod_base = OTHER; note = uracil
  modified_base 228: mod_base = OTHER; note = uracil
  modified_base 234..235: mod_base = OTHER; note = uracil
  modified_base 254: mod_base = OTHER; note = uracil
  modified_base 266: mod_base = OTHER; note = uracil
  modified_base 269: mod_base = OTHER; note = uracil
  modified_base 272: mod_base = OTHER; note = uracil
  modified_base 275..278: mod_base = OTHER; note = uracil
  modified_base 282..283: mod_base = OTHER; note = uracil
  modified_base 288..289: mod_base = OTHER; note = uracil
  modified_base 108: mod_base = m5c
  modified_base 187: mod_base = m5c
  modified_base 219: mod_base = m5c
  modified_base 247: mod_base = m5c
  modified_base 273: mod_base = m5c
  variation 150: note = CpG site, residue is C if methylated or T(=U) if unmethylated
ttattttaaggagaaaaggttagttttatagatggttttatttggttgtagtgggtaaaggttagaaattggtatagtattttgggtaggttgtttggggtagggttcggggttatagtttgggttggggttagatagagttttattttygtaaggttattttatttggtgttaatgaggaggtttcgggttttatttagatttggagtttatagtagcggtttggattgaaattagggatttgtgcgtggggtagtgaggggggtagttgtcgtttttggtttgggtttgagagtatag

SEQ ID NO: 253 - DNA, 300 bp, synthetic construct
  source 1..300: mol_type = other DNA
  modified_base 9: mod_base = OTHER; note = uracil
  modified_base 12: mod_base = OTHER; note = uracil
  modified_base 14..16: mod_base = OTHER; note = uracil
  modified_base 20: mod_base = OTHER; note = uracil
  modified_base 25: mod_base = OTHER; note = uracil
  modified_base 27..30: mod_base = OTHER; note = uracil
  modified_base 32..36: mod_base = OTHER; note = uracil
  modified_base 40: mod_base = OTHER; note = uracil
  modified_base 49: mod_base = OTHER; note = uracil
  modified_base 52: mod_base = OTHER; note = uracil
  modified_base 57..58: mod_base = OTHER; note = uracil
  modified_base 62: mod_base = OTHER; note = uracil
  modified_base 66..67: mod_base = OTHER; note = uracil
  modified_base 73..74: mod_base = OTHER; note = uracil
  modified_base 83..85: mod_base = OTHER; note = uracil
  modified_base 89..94: mod_base = OTHER; note = uracil
  modified_base 96: mod_base = OTHER; note = uracil
  modified_base 100: mod_base = OTHER; note = uracil
  modified_base 102..104: mod_base = OTHER; note = uracil
  modified_base 109..113: mod_base = OTHER; note = uracil
  modified_base 116: mod_base = OTHER; note = uracil
  modified_base 121: mod_base = OTHER; note = uracil
  modified_base 124..128: mod_base = OTHER; note = uracil
  modified_base 134..137: mod_base = OTHER; note = uracil
  modified_base 140..141: mod_base = OTHER; note = uracil
  modified_base 145..146: mod_base = OTHER; note = uracil
  modified_base 148: mod_base = OTHER; note = uracil
  modified_base 154: mod_base = OTHER; note = uracil
  modified_base 158: mod_base = OTHER; note = uracil
  modified_base 165..166: mod_base = OTHER; note = uracil
  modified_base 168: mod_base = OTHER; note = uracil
  modified_base 170..172: mod_base = OTHER; note = uracil
  modified_base 179: mod_base = OTHER; note = uracil
  modified_base 181: mod_base = OTHER; note = uracil
  modified_base 184: mod_base = OTHER; note = uracil
  modified_base 187: mod_base = OTHER; note = uracil
  modified_base 197: mod_base = OTHER; note = uracil
  modified_base 213..214: mod_base = OTHER; note = uracil
  modified_base 221: mod_base = OTHER; note = uracil
  modified_base 225: mod_base = OTHER; note = uracil
  modified_base 234..235: mod_base = OTHER; note = uracil
  modified_base 239: mod_base = OTHER; note = uracil
  modified_base 260: mod_base = OTHER; note = uracil
  modified_base 262: mod_base = OTHER; note = uracil
  modified_base 264..265: mod_base = OTHER; note = uracil
  modified_base 275: mod_base = OTHER; note = uracil
  modified_base 279..280: mod_base = OTHER; note = uracil
  modified_base 283: mod_base = OTHER; note = uracil
  modified_base 285..286: mod_base = OTHER; note = uracil
  modified_base 288: mod_base = OTHER; note = uracil
  modified_base 290: mod_base = OTHER; note = uracil
  modified_base 294: mod_base = OTHER; note = uracil
  modified_base 300: mod_base = OTHER; note = uracil
  modified_base 2: mod_base = m5c
  modified_base 50: mod_base = m5c
  modified_base 69: mod_base = m5c
  modified_base 86: mod_base = m5c
  modified_base 105: mod_base = m5c
  modified_base 107: mod_base = m5c
  modified_base 117: mod_base = m5c
  modified_base 122: mod_base = m5c
  modified_base 129: mod_base = m5c
  modified_base 155: mod_base = m5c
  modified_base 185: mod_base = m5c
  modified_base 215: mod_base = m5c
  modified_base 232: mod_base = m5c
  modified_base 247: mod_base = m5c
  modified_base 255: mod_base = m5c
  modified_base 281: mod_base = m5c
  variation 151: note = CpG site, residue is C if methylated or T(=U) if unmethylated
acgggtgtttgtttttaagttgggtattttttttttaggttgtgggaatcgttgggttattttgatttcgaattagaaatagtttcgattttttttttttttttcgcgtttttagtcggatcgtttttcgggattttagttaaattatagygttcggtatagggttttttttttattgtataatcgttaggggagatagagaggatgggggtttcgggaatatgttggggtcgttagattatgggacgtaggggcgtagtttatttgttggagataggttcgttttttattggttgagtt

SEQ ID NO: 254 - DNA, 300 bp, synthetic construct
  source 1..300: mol_type = other DNA
  modified_base 3: mod_base = OTHER; note = uracil
  modified_base 5: mod_base = OTHER; note = uracil
  modified_base 8..9: mod_base = OTHER; note = uracil
  modified_base 23..24: mod_base = OTHER; note = uracil
  modified_base 28: mod_base = OTHER; note = uracil
  modified_base 30..31: mod_base = OTHER; note = uracil
  modified_base 34: mod_base = OTHER; note = uracil
  modified_base 42: mod_base = OTHER; note = uracil
  modified_base 47..50: mod_base = OTHER; note = uracil
  modified_base 56..58: mod_base = OTHER; note = uracil
  modified_base 64: mod_base = OTHER; note = uracil
  modified_base 71..74: mod_base = OTHER; note = uracil
  modified_base 77: mod_base = OTHER; note = uracil
  modified_base 83..84: mod_base = OTHER; note = uracil
  modified_base 90..94: mod_base = OTHER; note = uracil
  modified_base 97..98: mod_base = OTHER; note = uracil
  modified_base 100: mod_base = OTHER; note = uracil
  modified_base 102: mod_base = OTHER; note = uracil
  modified_base 106: mod_base = OTHER; note = uracil
  modified_base 108..111: mod_base = OTHER; note = uracil
  modified_base 123: mod_base = OTHER; note = uracil
  modified_base 137..139: mod_base = OTHER; note = uracil
  modified_base 144: mod_base = OTHER; note = uracil
  modified_base 151: mod_base = OTHER; note = uracil
  modified_base 162: mod_base = OTHER; note = uracil
  modified_base 169..170: mod_base = OTHER; note = uracil
  modified_base 182: mod_base = OTHER; note = uracil
  modified_base 186: mod_base = OTHER; note = uracil
  modified_base 219: mod_base = OTHER; note = uracil
  modified_base 225: mod_base = OTHER; note = uracil
  modified_base 237: mod_base = OTHER; note = uracil
  modified_base 245..247: mod_base = OTHER; note = uracil
  modified_base 255..257: mod_base = OTHER; note = uracil
  modified_base 259: mod_base = OTHER; note = uracil
  modified_base 262..263: mod_base = OTHER; note = uracil
  modified_base 277..279: mod_base = OTHER; note = uracil
  modified_base 282: mod_base = OTHER; note = uracil
  modified_base 290: mod_base = OTHER; note = uracil
  modified_base 294: mod_base = OTHER; note = uracil
  modified_base 296..297: mod_base = OTHER; note = uracil
  modified_base 19: mod_base = m5c
  modified_base 45: mod_base = m5c
  modified_base 53: mod_base = m5c
  modified_base 68: mod_base = m5c
  modified_base 85: mod_base = m5c
  modified_base 115: mod_base = m5c
  modified_base 145: mod_base = m5c
  modified_base 171: mod_base = m5c
  modified_base 178: mod_base = m5c
  modified_base 183: mod_base = m5c
  modified_base 193: mod_base = m5c
  modified_base 195: mod_base = m5c
  modified_base 214: mod_base = m5c
  modified_base 231: mod_base = m5c
  modified_base 250: mod_base = m5c
  modified_base 298: mod_base = m5c
  variation 149: note = CpG site, residue is C if methylated or T(=U) if unmethylated
gatttagttagtgaggagcgggtttgtttttaataggtgagttacgtttttacgttttatagtttggcgattttagtatgttttcgggatttttattttttttgttttttttagcggttgtgtaataagggagaggttttatgtcggaygttgtggtttggttggggtttcggggggcggttcggttgggggcgcggggagaaagaggggggtcggggttatttttggttcgaggttagaatggtttagcggtttttatagtttgggggaggggtgtttagtttgggagtagatattcgt

SEQ ID NO: 255 - DNA, 300 bp, synthetic construct
  source 1..300: mol_type = other DNA
  modified_base 2: mod_base = OTHER; note = uracil
  modified_base 9: mod_base = OTHER; note = uracil
  modified_base 13..14: mod_base = OTHER; note = uracil
  modified_base 22: mod_base = OTHER; note = uracil
  modified_base 39: mod_base = OTHER; note = uracil
  modified_base 54: mod_base = OTHER; note = uracil
  modified_base 57..59: mod_base = OTHER; note = uracil
  modified_base 65..67: mod_base = OTHER; note = uracil
  modified_base 71: mod_base = OTHER; note = uracil
  modified_base 79: mod_base = OTHER; note = uracil
  modified_base 88: mod_base = OTHER; note = uracil
  modified_base 93..94: mod_base = OTHER; note = uracil
  modified_base 98: mod_base = OTHER; note = uracil
  modified_base 100: mod_base = OTHER; note = uracil
  modified_base 103: mod_base = OTHER; note = uracil
  modified_base 110: mod_base = OTHER; note = uracil
  modified_base 122..123: mod_base = OTHER; note = uracil
  modified_base 127: mod_base = OTHER; note = uracil
  modified_base 133..135: mod_base = OTHER; note = uracil
  modified_base 149: mod_base = OTHER; note = uracil
  modified_base 155: mod_base = OTHER; note = uracil
  modified_base 165: mod_base = OTHER; note = uracil
  modified_base 170: mod_base = OTHER; note = uracil
  modified_base 180: mod_base = OTHER; note = uracil
  modified_base 185: mod_base = OTHER; note = uracil
  modified_base 212: mod_base = OTHER; note = uracil
  modified_base 218: mod_base = OTHER; note = uracil
  modified_base 221..223: mod_base = OTHER; note = uracil
  modified_base 226..227: mod_base = OTHER; note = uracil
  modified_base 237..239: mod_base = OTHER; note = uracil
  modified_base 279: mod_base = OTHER; note = uracil
  modified_base 281: mod_base = OTHER; note = uracil
  modified_base 33: mod_base = m5c
  modified_base 35: mod_base = m5c
  modified_base 44: mod_base = m5c
  modified_base 50: mod_base = m5c
  modified_base 60: mod_base = m5c
  modified_base 73: mod_base = m5c
  modified_base 84: mod_base = m5c
  modified_base 86: mod_base = m5c
  modified_base 95: mod_base = m5c
  modified_base 106: mod_base = m5c
  modified_base 111: mod_base = m5c
  modified_base 139: mod_base = m5c
  modified_base 156: mod_base = m5c
  modified_base 162: mod_base = m5c
  modified_base 171: mod_base = m5c
  modified_base 181: mod_base = m5c
  modified_base 188: mod_base = m5c
  modified_base 192: mod_base = m5c
  modified_base 200: mod_base = m5c
  modified_base 207: mod_base = m5c
  modified_base 215: mod_base = m5c
  modified_base 224: mod_base = m5c
  modified_base 228: mod_base = m5c
  modified_base 240: mod_base = m5c
  modified_base 243: mod_base = m5c
  modified_base 254: mod_base = m5c
  modified_base 270: mod_base = m5c
  modified_base 285: mod_base = m5c
  variation 151: note = CpG site, residue is C if methylated or T(=U) if unmethylated
gtagtaaatagttttattgtataaatatatagcgcgggttgggcgggggcggttaatttcggttttttggtacggggatagggcgcgttgggttcggttttgtagcgagtcggtgggagggtttagttgtggtttaggcggtgttgagtaygggtcgggggcgttatagtcggggagggtcgggtagcgagcgggtgggcgaggggcgagttatcgtttgtttcgttcggaggggatttcggcgggtgagggacgtgggtggagggagacgtggggagtttagtcggagtagatgatgaa

SEQ ID NO: 256 - DNA, 300 bp, synthetic construct
  source 1..300: mol_type = other DNA
  modified_base 3: mod_base = OTHER; note = uracil
  modified_base 6: mod_base = OTHER; note = uracil
  modified_base 9: mod_base = OTHER; note = uracil
  modified_base 12: mod_base = OTHER; note = uracil
  modified_base 14: mod_base = OTHER; note = uracil
  modified_base 18: mod_base = OTHER; note = uracil
  modified_base 23: mod_base = OTHER; note = uracil
  modified_base 25..28: mod_base = OTHER; note = uracil
  modified_base 33: mod_base = OTHER; note = uracil
  modified_base 35..37: mod_base = OTHER; note = uracil
  modified_base 39..40: mod_base = OTHER; note = uracil
  modified_base 42..44: mod_base = OTHER; note = uracil
  modified_base 49..51: mod_base = OTHER; note = uracil
  modified_base 53: mod_base = OTHER; note = uracil
  modified_base 55..56: mod_base = OTHER; note = uracil
  modified_base 59: mod_base = OTHER; note = uracil
  modified_base 66..69: mod_base = OTHER; note = uracil
  modified_base 71: mod_base = OTHER; note = uracil
  modified_base 81: mod_base = OTHER; note = uracil
  modified_base 91: mod_base = OTHER; note = uracil
  modified_base 95..98: mod_base = OTHER; note = uracil
  modified_base 102..104: mod_base = OTHER; note = uracil
  modified_base 106..107: mod_base = OTHER; note = uracil
  modified_base 110: mod_base = OTHER; note = uracil
  modified_base 114: mod_base = OTHER; note = uracil
  modified_base 117..118: mod_base = OTHER; note = uracil
  modified_base 122..124: mod_base = OTHER; note = uracil
  modified_base 126..128: mod_base = OTHER; note = uracil
  modified_base 132: mod_base = OTHER; note = uracil
  modified_base 140..143: mod_base = OTHER; note = uracil
  modified_base 147..148: mod_base = OTHER; note = uracil
  modified_base 153: mod_base = OTHER; note = uracil
  modified_base 155: mod_base = OTHER; note = uracil
  modified_base 158: mod_base = OTHER; note = uracil
  modified_base 160: mod_base = OTHER; note = uracil
  modified_base 163..164: mod_base = OTHER; note = uracil
  modified_base 169..170: mod_base = OTHER; note = uracil
  modified_base 172: mod_base = OTHER; note = uracil
  modified_base 175: mod_base = OTHER; note = uracil
  modified_base 180..182: mod_base = OTHER; note = uracil
  modified_base 184..186: mod_base = OTHER; note = uracil
  modified_base 188: mod_base = OTHER; note = uracil
  modified_base 192: mod_base = OTHER; note = uracil
  modified_base 196: mod_base = OTHER; note = uracil
  modified_base 199: mod_base = OTHER; note = uracil
  modified_base 204: mod_base = OTHER; note = uracil
  modified_base 209..211: mod_base = OTHER; note = uracil
  modified_base 218..220: mod_base = OTHER; note = uracil
  modified_base 224..226: mod_base = OTHER; note = uracil
  modified_base 231..232: mod_base = OTHER; note = uracil
  modified_base 239: mod_base = OTHER; note = uracil
  modified_base 249: mod_base = OTHER; note = uracil
  modified_base 252..255: mod_base = OTHER; note = uracil
  modified_base 258..260: mod_base = OTHER; note = uracil
  modified_base 263..264: mod_base = OTHER; note = uracil
  modified_base 269: mod_base = OTHER; note = uracil
  modified_base 282: mod_base = OTHER; note = uracil
  modified_base 290: mod_base = OTHER; note = uracil
  modified_base 297: mod_base = OTHER; note = uracil
  modified_base 300: mod_base = OTHER; note = uracil
  modified_base 15: mod_base = m5c
  modified_base 30: mod_base = m5c
  modified_base 46: mod_base = m5c
  modified_base 57: mod_base = m5c
  modified_base 60: mod_base = m5c
  modified_base 72: mod_base = m5c
  modified_base 76: mod_base = m5c
  modified_base 85: mod_base = m5c
  modified_base 93: mod_base = m5c
  modified_base 100: mod_base = m5c
  modified_base 108: mod_base = m5c
  modified_base 112: mod_base = m5c
  modified_base 119: mod_base = m5c
  modified_base 129: mod_base = m5c
  modified_base 138: mod_base = m5c
  modified_base 144: mod_base = m5c
  modified_base 161: mod_base = m5c
  modified_base 189: mod_base = m5c
  modified_base 194: mod_base = m5c
  modified_base 205: mod_base = m5c
  modified_base 214: mod_base = m5c
  modified_base 216: mod_base = m5c
  modified_base 227: mod_base = m5c
  modified_base 240: mod_base = m5c
  modified_base 250: mod_base = m5c
  modified_base 256: mod_base = m5c
  modified_base 265: mod_base = m5c
  modified_base 267: mod_base = m5c
  variation 149: note = CpG site, residue is C if methylated or T(=U) if unmethylated
tttattatttatttcgattgagttttttacgtttttttttatttacgttttttattcgtcggggtttttttcgggcggggtagacgatgattcgtttttcgtttattcgttcgttgttcggtttttttcggttatgacgttttcggttygtgtttaatatcgtttgggttatagttaggtttttttatcggttcgttgtagagtcgggtttagcgcgttttgttttcgtgttagggaatcggggttgatcgttttcgtttagttcgcgttatatatttgtataataggattgtttattgt

SEQ ID NO: 257 - DNA, 300 bp, synthetic construct
  source 1..300: mol_type = other DNA
  modified_base 13: mod_base = OTHER; note = uracil
  modified_base 18..21: mod_base = OTHER; note = uracil
  modified_base 27: mod_base = OTHER; note = uracil
  modified_base 29: mod_base = OTHER; note = uracil
  modified_base 33..34: mod_base = OTHER; note = uracil
  modified_base 38: mod_base = OTHER; note = uracil
  modified_base 40: mod_base = OTHER; note = uracil
  modified_base 45..46: mod_base = OTHER; note = uracil
  modified_base 48: mod_base = OTHER; note = uracil
  modified_base 54: mod_base = OTHER; note = uracil
  modified_base 56..57: mod_base = OTHER; note = uracil
  modified_base 60..61: mod_base = OTHER; note = uracil
  modified_base 74..75: mod_base = OTHER; note = uracil
  modified_base 77: mod_base = OTHER; note = uracil
  modified_base 81: mod_base = OTHER; note = uracil
  modified_base 85..86: mod_base = OTHER; note = uracil
  modified_base 89: mod_base = OTHER; note = uracil
  modified_base 92: mod_base = OTHER; note = uracil
  modified_base 98..99: mod_base = OTHER; note = uracil
  modified_base 106: mod_base = OTHER; note = uracil
  modified_base 115: mod_base = OTHER; note = uracil
  modified_base 118: mod_base = OTHER; note = uracil
  modified_base 126: mod_base = OTHER; note = uracil
  modified_base 130: mod_base = OTHER; note = uracil
  modified_base 132: mod_base = OTHER; note = uracil
  modified_base 137..139: mod_base = OTHER; note = uracil
  modified_base 153..155: mod_base = OTHER; note = uracil
  modified_base 157: mod_base = OTHER; note = uracil
  modified_base 159..160: mod_base = OTHER; note = uracil
  modified_base 164: mod_base = OTHER; note = uracil
  modified_base 166: mod_base = OTHER; note = uracil
  modified_base 170..174: mod_base = OTHER; note = uracil
  modified_base 180: mod_base = OTHER; note = uracil
  modified_base 189..191: mod_base = OTHER; note = uracil
  modified_base 194..196: mod_base = OTHER; note = uracil
  modified_base 200: mod_base = OTHER; note = uracil
  modified_base 205..206: mod_base = OTHER; note = uracil
  modified_base 208: mod_base = OTHER; note = uracil
  modified_base 210..212: mod_base = OTHER; note = uracil
  modified_base 215: mod_base = OTHER; note = uracil
  modified_base 217: mod_base = OTHER; note = uracil
  modified_base 220: mod_base = OTHER; note = uracil
  modified_base 225..226: mod_base = OTHER; note = uracil
  modified_base 228: mod_base = OTHER; note = uracil
  modified_base 238: mod_base = OTHER; note = uracil
  modified_base 240: mod_base = OTHER; note = uracil
  modified_base 243..244: mod_base = OTHER; note = uracil
  modified_base 259: mod_base = OTHER; note = uracil
  modified_base 266: mod_base = OTHER; note = uracil
  modified_base 284: mod_base = OTHER; note = uracil
  modified_base 121: mod_base = m5c
  modified_base 127: mod_base = m5c
  modified_base 140: mod_base = m5c
  modified_base 182: mod_base = m5c
  modified_base 231: mod_base = m5c
  variation 150: note = CpG site, residue is C if methylated or T(=U) if unmethylated
  variation 293: note = CpG site, residue is C if methylated or T(=U) if unmethylated
agttatttaatatatggttttagtggtattaatttgttattaagttttatgttttttatttataaaatggagattataattatatttgttgtaaaatttaaaatttagaggtttttatagcgtgatcgatattgtgtttcggagagtttyggtttttttttggttttggttttttggaatacgtgatgtttagtttaaatagtgttatattttgttttataatgttttaacgagagttataattaaagatttttgagttagaggataatagaggaggtgggaattgggtaaayggagagt

SEQ ID NO: 258 - DNA, 300 bp, synthetic construct
  source 1..300: mol_type = other DNA
  modified_base 1: mod_base = OTHER; note = uracil
  modified_base 3: mod_base = OTHER; note = uracil
  modified_base 5: mod_base = OTHER; note = uracil
  modified_base 12..14: mod_base = OTHER; note = uracil
  modified_base 19..21: mod_base = OTHER; note = uracil
  modified_base 23..24: mod_base = OTHER; note = uracil
  modified_base 26..27: mod_base = OTHER; note = uracil
  modified_base 29: mod_base = OTHER; note = uracil
  modified_base 36..37: mod_base = OTHER; note = uracil
  modified_base 39: mod_base = OTHER; note = uracil
  modified_base 43: mod_base = OTHER; note = uracil
  modified_base 45: mod_base = OTHER; note = uracil
  modified_base 52: mod_base = OTHER; note = uracil
  modified_base 64: mod_base = OTHER; note = uracil
  modified_base 66: mod_base = OTHER; note = uracil
  modified_base 76: mod_base = OTHER; note = uracil
  modified_base 86: mod_base = OTHER; note = uracil
  modified_base 96: mod_base = OTHER; note = uracil
  modified_base 98: mod_base = OTHER; note = uracil
  modified_base 107: mod_base = OTHER; note = uracil
  modified_base 112: mod_base = OTHER; note = uracil
  modified_base 115: mod_base = OTHER; note = uracil
  modified_base 123..124: mod_base = OTHER; note = uracil
  modified_base 131..132: mod_base = OTHER; note = uracil
  modified_base 137..138: mod_base = OTHER; note = uracil
  modified_base 148: mod_base = OTHER; note = uracil
  modified_base 154: mod_base = OTHER; note = uracil
  modified_base 156: mod_base = OTHER; note = uracil
  modified_base 158: mod_base = OTHER; note = uracil
  modified_base 164: mod_base = OTHER; note = uracil
  modified_base 166: mod_base = OTHER; note = uracil
  modified_base 176: mod_base = OTHER; note = uracil
  modified_base 180: mod_base = OTHER; note = uracil
  modified_base 189..190: mod_base = OTHER; note = uracil
  modified_base 192: mod_base = OTHER; note = uracil
  modified_base 209: mod_base = OTHER; note = uracil
  modified_base 212: mod_base = OTHER; note = uracil
  modified_base 228: mod_base = OTHER; note = uracil
  modified_base 230..231: mod_base = OTHER; note = uracil
  modified_base 249: mod_base = OTHER; note = uracil
  modified_base 256: mod_base = OTHER; note = uracil
  modified_base 264: mod_base = OTHER; note = uracil
  modified_base 274..275: mod_base = OTHER; note = uracil
  modified_base 277: mod_base = OTHER; note = uracil
  modified_base 283..284: mod_base = OTHER; note = uracil
  modified_base 298: mod_base = OTHER; note = uracil
  modified_base 68: mod_base = m5c
  modified_base 117: mod_base = m5c
  modified_base 159: mod_base = m5c
  modified_base 172: mod_base = m5c
  modified_base 178: mod_base = m5c
  variation 6: note = CpG site, residue is C if methylated or T(=U) if unmethylated
  variation 149: note = CpG site, residue is C if methylated or T(=U) if unmethylated
tttttygtttatttagtttttattttttttattgttttttgatttaaaaatttttggttgtgattttcgttgaggtattgtagagtagggtgtggtattgtttgggttgggtattacgtgttttagggggttagagttaggagagggtygaaatttttcggggtatagtgtcggttacgttgtagaaatttttgaattttggattttgtagtaggtatgattgtggtttttattttatggatggagaatatgaggtttagtgataggttagtgttattggggttatgtattaaataattg

SEQ ID NO: 259 - DNA, 300 bp, synthetic construct
  source 1..300: mol_type = other DNA
  modified_base 10..12: mod_base = OTHER; note = uracil
  modified_base 14: mod_base = OTHER; note = uracil
  modified_base 16..17: mod_base = OTHER; note = uracil
  modified_base 21: mod_base = OTHER; note = uracil
  modified_base 23: mod_base = OTHER; note = uracil
  modified_base 27..31: mod_base = OTHER; note = uracil
  modified_base 37: mod_base = OTHER; note = uracil
  modified_base 46..48: mod_base = OTHER; note = uracil
  modified_base 51..53: mod_base = OTHER; note = uracil
  modified_base 57: mod_base = OTHER; note = uracil
  modified_base 62..63: mod_base = OTHER; note = uracil
  modified_base 65: mod_base = OTHER; note = uracil
  modified_base 67..69: mod_base = OTHER; note = uracil
  modified_base 72: mod_base = OTHER; note = uracil
  modified_base 74: mod_base = OTHER; note = uracil
  modified_base 77: mod_base = OTHER; note = uracil
  modified_base 82..83: mod_base = OTHER; note = uracil
  modified_base 85: mod_base = OTHER; note = uracil
  modified_base 95: mod_base = OTHER; note = uracil
  modified_base 97: mod_base = OTHER; note = uracil
  modified_base 100..101: mod_base = OTHER; note = uracil
  modified_base 116: mod_base = OTHER; note = uracil
  modified_base 123: mod_base = OTHER; note = uracil
  modified_base 141: mod_base = OTHER; note = uracil
  modified_base 158..159: mod_base = OTHER; note = uracil
  modified_base 164..165: mod_base = OTHER; note = uracil
  modified_base 179: mod_base = OTHER; note = uracil
  modified_base 181: mod_base = OTHER; note = uracil
  modified_base 184..185: mod_base = OTHER; note = uracil
  modified_base 201..203: mod_base = OTHER; note = uracil
  modified_base 211..212: mod_base = OTHER; note = uracil
  modified_base 219: mod_base = OTHER; note = uracil
  modified_base 231: mod_base = OTHER; note = uracil
  modified_base 243..244: mod_base = OTHER; note = uracil
  modified_base 246..247: mod_base = OTHER; note = uracil
  modified_base 255: mod_base = OTHER; note = uracil
  modified_base 265: mod_base = OTHER; note = uracil
  modified_base 274: mod_base = OTHER; note = uracil
  modified_base 296: mod_base = OTHER; note = uracil
  modified_base 39: mod_base = m5c
  modified_base 88: mod_base = m5c
  modified_base 186: mod_base = m5c
  modified_base 220: mod_base = m5c
  modified_base 268: mod_base = m5c
  variation 7: note = CpG site, residue is C if methylated or T(=U) if unmethylated
  variation 150: note = CpG site, residue is C if methylated or T(=U) if unmethylated
gagtttyggtttttttttggttttggttttttggaatacgtgatgtttagtttaaatagtgttatattttgttttataatgttttaacgagagttataattaaagatttttgagttagaggataatagaggaggtgggaattgggtaaayggagagtttatggtttttggaggtggggtatagttcggagtgaatgagggtttagagtttttagagaatcgaatatagatttgtgtgtgaagtttttagatattttaatgttgataacgaaattaaattgaaaaaaaataaaaattaata

SEQ ID NO: 260 - DNA, 300 bp, synthetic construct
  source 1..300: mol_type = other DNA
  modified_base 20: mod_base = OTHER; note = uracil
  modified_base 37: mod_base = OTHER; note = uracil
  modified_base 40: mod_base = OTHER; note = uracil
  modified_base 51: mod_base = OTHER; note = uracil
  modified_base 58: mod_base = OTHER; note = uracil
  modified_base 61: mod_base = OTHER; note = uracil
  modified_base 63: mod_base = OTHER; note = uracil
  modified_base 65: mod_base = OTHER; note = uracil
  modified_base 67: mod_base = OTHER; note = uracil
  modified_base 72: mod_base = OTHER; note = uracil
  modified_base 84: mod_base = OTHER; note = uracil
  modified_base 86: mod_base = OTHER; note = uracil
  modified_base 93: mod_base = OTHER; note = uracil
  modified_base 95: mod_base = OTHER; note = uracil
  modified_base 100..102: mod_base = OTHER; note = uracil
  modified_base 104: mod_base = OTHER; note = uracil
  modified_base 108: mod_base = OTHER; note = uracil
  modified_base 110: mod_base = OTHER; note = uracil
  modified_base 112: mod_base = OTHER; note = uracil
  modified_base 117: mod_base = OTHER; note = uracil
  modified_base 122..125: mod_base = OTHER; note = uracil
  modified_base 127..128: mod_base = OTHER; note = uracil
  modified_base 130..131: mod_base = OTHER; note = uracil
  modified_base 137..138: mod_base = OTHER; note = uracil
  modified_base 144: mod_base = OTHER; note = uracil
  modified_base 146: mod_base = OTHER; note = uracil
  modified_base 148: mod_base = OTHER; note = uracil
  modified_base 155..157: mod_base = OTHER; note = uracil
  modified_base 162..164: mod_base = OTHER; note = uracil
  modified_base 166..167: mod_base = OTHER; note = uracil
  modified_base 169..170: mod_base = OTHER; note = uracil
  modified_base 172: mod_base = OTHER; note = uracil
  modified_base 179..180: mod_base = OTHER; note = uracil
  modified_base 182: mod_base = OTHER; note = uracil
  modified_base 186: mod_base = OTHER; note = uracil
  modified_base 188: mod_base = OTHER; note = uracil
  modified_base 195: mod_base = OTHER; note = uracil
  modified_base 207: mod_base = OTHER; note = uracil
  modified_base 209: mod_base = OTHER; note = uracil
  modified_base 219: mod_base = OTHER; note = uracil
  modified_base 229: mod_base = OTHER; note = uracil
  modified_base 239: mod_base = OTHER; note = uracil
  modified_base 241: mod_base = OTHER; note = uracil
  modified_base 250: mod_base = OTHER; note = uracil
  modified_base 255: mod_base = OTHER; note = uracil
  modified_base 258: mod_base = OTHER; note = uracil
  modified_base 266..267: mod_base = OTHER; note = uracil
  modified_base 274..275: mod_base = OTHER; note = uracil
  modified_base 280..281: mod_base = OTHER; note = uracil
  modified_base 291: mod_base = OTHER; note = uracil
  modified_base 297: mod_base = OTHER; note = uracil
  modified_base 299: mod_base = OTHER; note = uracil
  modified_base 31: mod_base = m5c
  modified_base 79: mod_base = m5c
  modified_base 113: mod_base = m5c
  modified_base 211: mod_base = m5c
  modified_base 260: mod_base = m5c
  variation 149: note = CpG site, residue is C if methylated or T(=U) if unmethylated
  variation 292: note = CpG site, residue is C if methylated or T(=U) if unmethylated
attgatttttatttttttttaatttgatttcgttgttaatattagaatatttggaggttttatatatagatttatattcggttttttggaaattttgggtttttatttatttcgggttgtgttttatttttaaaggttatggatttttygtttatttagtttttattttttttattgttttttgatttaaaaatttttggttgtgattttcgttgaggtattgtagagtagggtgtggtattgtttgggttgggtattacgtgttttagggggttagagttaggagagggtygaaatttt

SEQ ID NO: 261 - DNA, 300 bp, synthetic construct
  source 1..300: mol_type = other DNA
  modified_base 11..12: mod_base = OTHER; note = uracil
  modified_base 15..16: mod_base = OTHER; note = uracil
  modified_base 18..19: mod_base = OTHER; note = uracil
  modified_base 22: mod_base = OTHER; note = uracil
  modified_base 25: mod_base = OTHER; note = uracil
  modified_base 27..29: mod_base = OTHER; note = uracil
  modified_base 32..34: mod_base = OTHER; note = uracil
  modified_base 37..39: mod_base = OTHER; note = uracil
  modified_base 42..44: mod_base = OTHER; note = uracil
  modified_base 47..49: mod_base = OTHER; note = uracil
  modified_base 53..56: mod_base = OTHER; note = uracil
  modified_base 58..62: mod_base = OTHER; note = uracil
  modified_base 64..67: mod_base = OTHER; note = uracil
  modified_base 69: mod_base = OTHER; note = uracil
  modified_base 72..74: mod_base = OTHER; note = uracil
  modified_base 76..80: mod_base = OTHER; note = uracil
  modified_base 83..86: mod_base = OTHER; note = uracil
  modified_base 89: mod_base = OTHER; note = uracil
  modified_base 96..99: mod_base = OTHER; note = uracil
  modified_base 101: mod_base = OTHER; note = uracil
  modified_base 103..104: mod_base = OTHER; note = uracil
  modified_base 108..110: mod_base = OTHER; note = uracil
  modified_base 113..114: mod_base = OTHER; note = uracil
  modified_base 117..118: mod_base = OTHER; note = uracil
  modified_base 123: mod_base = OTHER; note = uracil
  modified_base 125..126: mod_base = OTHER; note = uracil
  modified_base 136: mod_base = OTHER; note = uracil
  modified_base 139: mod_base = OTHER; note = uracil
  modified_base 143: mod_base = OTHER; note = uracil
  modified_base 147: mod_base = OTHER; note = uracil
  modified_base 152..153: mod_base = OTHER; note = uracil
  modified_base 155..156: mod_base = OTHER; note = uracil
  modified_base 158: mod_base = OTHER; note = uracil
  modified_base 162..164: mod_base = OTHER; note = uracil
  modified_base 168: mod_base = OTHER; note = uracil
  modified_base 182: mod_base = OTHER; note = uracil
  modified_base 190..191: mod_base = OTHER; note = uracil
  modified_base 196: mod_base = OTHER; note = uracil
  modified_base 198..200: mod_base = OTHER; note = uracil
  modified_base 202..203: mod_base = OTHER; note = uracil
  modified_base 208: mod_base = OTHER; note = uracil
  modified_base 216: mod_base = OTHER; note = uracil
  modified_base 218..219: mod_base = OTHER; note = uracil
  modified_base 224: mod_base = OTHER; note = uracil
  modified_base 227: mod_base = OTHER; note = uracil
  modified_base 235..236: mod_base = OTHER; note = uracil
  modified_base 241: mod_base = OTHER; note = uracil
  modified_base 244: mod_base = OTHER; note = uracil
  modified_base 252..253: mod_base = OTHER; note = uracil
  modified_base 261: mod_base = OTHER; note = uracil
  modified_base 263: mod_base = OTHER; note = uracil
  modified_base 276: mod_base = OTHER; note = uracil
  modified_base 281: mod_base = OTHER; note = uracil
  modified_base 286: mod_base = OTHER; note = uracil
  modified_base 289..290: mod_base = OTHER; note = uracil
  modified_base 292..293: mod_base = OTHER; note = uracil
  modified_base 298: mod_base = OTHER; note = uracil
  modified_base 1: mod_base = m5c
  modified_base 7: mod_base = m5c
  modified_base 13: mod_base = m5c
  modified_base 23: mod_base = m5c
  modified_base 87: mod_base = m5c
  modified_base 91: mod_base = m5c
  modified_base 94: mod_base = m5c
  modified_base 105: mod_base = m5c
  modified_base 119: mod_base = m5c
  modified_base 128: mod_base = m5c
  modified_base 133: mod_base = m5c
  modified_base 137: mod_base = m5c
  modified_base 141: mod_base = m5c
  modified_base 144: mod_base = m5c
  modified_base 165: mod_base = m5c
  modified_base 172: mod_base = m5c
  modified_base 174: mod_base = m5c
  modified_base 176: mod_base = m5c
  modified_base 184: mod_base = m5c
  modified_base 187: mod_base = m5c
  modified_base 192: mod_base = m5c
  modified_base 194: mod_base = m5c
  modified_base 205: mod_base = m5c
  modified_base 213: mod_base = m5c
  modified_base 220: mod_base = m5c
  modified_base 222: mod_base = m5c
  modified_base 228: mod_base = m5c
  modified_base 264: mod_base = m5c
  modified_base 267: mod_base = m5c
  modified_base 274: mod_base = m5c
  modified_base 277: mod_base = m5c
  modified_base 294: mod_base = m5c
  variation 150: note = CpG site, residue is C if methylated or T(=U) if unmethylated
cgggtgcggattcgttatttgtcgtatttttttttttttaattttgttttttttttatttttattttattttttatttttaattttcgttcggcgttttattttcgattttgtttgttcgggtatttcggggcgttcgttcgtcggtttygtttttatttgtttcggtaggcgcgcgtgggttcggcgtttcgcgtttttttttcgattgtgcggttttcgcgttgtcgggttttttgtttaataatataattagggaggtatcggcggagagcgtcgggtagaattttttttcggattg

SEQ ID NO: 262 - DNA, 300 bp, synthetic construct
  source 1..300: mol_type = other DNA
  modified_base 1: mod_base = OTHER; note = uracil
  modified_base 5: mod_base = OTHER; note = uracil
  modified_base 18: mod_base = OTHER; note = uracil
  modified_base 21..22: mod_base = OTHER; note = uracil
  modified_base 28: mod_base = OTHER; note = uracil
  modified_base 30: mod_base = OTHER; note = uracil
  modified_base 32: mod_base = OTHER; note = uracil
  modified_base 35: mod_base = OTHER; note = uracil
  modified_base 41..42: mod_base = OTHER; note = uracil
  modified_base 44..46: mod_base = OTHER; note = uracil
  modified_base 63: mod_base = OTHER; note = uracil
  modified_base 70..71: mod_base = OTHER; note = uracil
  modified_base 75: mod_base = OTHER; note = uracil
  modified_base 86: mod_base = OTHER; note = uracil
  modified_base 89: mod_base = OTHER; note = uracil
  modified_base 91: mod_base = OTHER; note = uracil
  modified_base 115: mod_base = OTHER; note = uracil
  modified_base 120..122: mod_base = OTHER; note = uracil
  modified_base 130..131: mod_base = OTHER; note = uracil
  modified_base 134: mod_base = OTHER; note = uracil
  modified_base 140: mod_base = OTHER; note = uracil
  modified_base 155: mod_base = OTHER; note = uracil
  modified_base 169..171: mod_base = OTHER; note = uracil
  modified_base 179..180: mod_base = OTHER; note = uracil
  modified_base 185: mod_base = OTHER; note = uracil
  modified_base 189: mod_base = OTHER; note = uracil
  modified_base 208: mod_base = OTHER; note = uracil
  modified_base 255: mod_base = OTHER; note = uracil
  modified_base 280: mod_base = OTHER; note = uracil
  modified_base 292: mod_base = OTHER; note = uracil
  modified_base 295: mod_base = OTHER; note = uracil
  modified_base 297..298: mod_base = OTHER; note = uracil
  modified_base 6: mod_base = m5c
  modified_base 23: mod_base = m5c
  modified_base 26: mod_base = m5c
  modified_base 33: mod_base = m5c
  modified_base 36: mod_base = m5c
  modified_base 72: mod_base = m5c
  modified_base 78: mod_base = m5c
  modified_base 80: mod_base = m5c
  modified_base 87: mod_base = m5c
  modified_base 95: mod_base = m5c
  modified_base 106: mod_base = m5c
  modified_base 108: mod_base = m5c
  modified_base 113: mod_base = m5c
  modified_base 116: mod_base = m5c
  modified_base 124: mod_base = m5c
  modified_base 126: mod_base = m5c
  modified_base 128: mod_base = m5c
  modified_base 135: mod_base = m5c
  modified_base 156: mod_base = m5c
  modified_base 159: mod_base = m5c
  modified_base 163: mod_base = m5c
  modified_base 167: mod_base = m5c
  modified_base 172: mod_base = m5c
  modified_base 181: mod_base = m5c
  modified_base 195: mod_base = m5c
  modified_base 206: mod_base = m5c
  modified_base 209: mod_base = m5c
  modified_base 213: mod_base = m5c
  modified_base 277: mod_base = m5c
  modified_base 287: mod_base = m5c
  modified_base 293: mod_base = m5c
  modified_base 299: mod_base = m5c
  variation 150: note = CpG site, residue is C if methylated or T(=U) if unmethylated
tagttcgggaggaagttttgttcggcgtttttcgtcggtgtttttttggttatattgttgaataggaaattcggtagcgcgggagtcgtatagtcgaggagggagcgcgggacgtcgagtttacgcgcgtttgtcggggtaagtggaggygaagtcggcgagcggacgtttcgaggtgttcgggtaggtagggtcgggagtggggcgtcgagcgggggttgggggtgggaagtggggtgggggtggggaaagggtagggttgggaagggaagggtgcggtaggtggcgggttcgtattcg

SEQ ID NO: 263 - DNA, 300 bp, synthetic construct
  source 1..300: mol_type = other DNA
  modified_base 3: mod_base = OTHER; note = uracil
  modified_base 8: mod_base = OTHER; note = uracil
  modified_base 12: mod_base = OTHER; note = uracil
  modified_base 19: mod_base = OTHER; note = uracil
  modified_base 23: mod_base = OTHER; note = uracil
  modified_base 25: mod_base = OTHER; note = uracil
  modified_base 30: mod_base = OTHER; note = uracil
  modified_base 37..38: mod_base = OTHER; note = uracil
  modified_base 50: mod_base = OTHER; note = uracil
  modified_base 52: mod_base = OTHER; note = uracil
  modified_base 60: mod_base = OTHER; note = uracil
  modified_base 71: mod_base = OTHER; note = uracil
  modified_base 76: mod_base = OTHER; note = uracil
  modified_base 79: mod_base = OTHER; note = uracil
  modified_base 81..83: mod_base = OTHER; note = uracil
  modified_base 95: mod_base = OTHER; note = uracil
  modified_base 103: mod_base = OTHER; note = uracil
  modified_base 110: mod_base = OTHER; note = uracil
  modified_base 121..125: mod_base = OTHER; note = uracil
  modified_base 131: mod_base = OTHER; note = uracil
  modified_base 136..137: mod_base = OTHER; note = uracil
  modified_base 140: mod_base = OTHER; note = uracil
  modified_base 166: mod_base = OTHER; note = uracil
  modified_base 169: mod_base = OTHER; note = uracil
  modified_base 195: mod_base = OTHER; note = uracil
  modified_base 198: mod_base = OTHER; note = uracil
  modified_base 203: mod_base = OTHER; note = uracil
  modified_base 219..220: mod_base = OTHER; note = uracil
  modified_base 224: mod_base = OTHER; note = uracil
  modified_base 226: mod_base = OTHER; note = uracil
  modified_base 232..235: mod_base = OTHER; note = uracil
  modified_base 241: mod_base = OTHER; note = uracil
  modified_base 246..247: mod_base = OTHER; note = uracil
  modified_base 250: mod_base = OTHER; note = uracil
  modified_base 263..264: mod_base = OTHER; note = uracil
  modified_base 275: mod_base = OTHER; note = uracil
  modified_base 287..291: mod_base = OTHER; note = uracil
  modified_base 293..295: mod_base = OTHER; note = uracil
  modified_base 300: mod_base = OTHER; note = uracil
  modified_base 17: mod_base = m5c
  modified_base 20: mod_base = m5c
  modified_base 26: mod_base = m5c
  modified_base 32: mod_base = m5c
  modified_base 41: mod_base = m5c
  modified_base 45: mod_base = m5c
  modified_base 53: mod_base = m5c
  modified_base 55: mod_base = m5c
  modified_base 61: mod_base = m5c
  modified_base 63: mod_base = m5c
  modified_base 72: mod_base = m5c
  modified_base 86: mod_base = m5c
  modified_base 101: mod_base = m5c
  modified_base 105: mod_base = m5c
  modified_base 108: mod_base = m5c
  modified_base 113: mod_base = m5c
  modified_base 117: mod_base = m5c
  modified_base 119: mod_base = m5c
  modified_base 126: mod_base = m5c
  modified_base 134: mod_base = m5c
  modified_base 138: mod_base = m5c
  modified_base 185: mod_base = m5c
  modified_base 189: mod_base = m5c
  modified_base 191: mod_base = m5c
  modified_base 196: mod_base = m5c
  modified_base 199: mod_base = m5c
  modified_base 216: mod_base = m5c
  modified_base 221: mod_base = m5c
  modified_base 229: mod_base = m5c
  modified_base 248: mod_base = m5c
  modified_base 251: mod_base = m5c
  modified_base 268: mod_base = m5c
  modified_base 277: mod_base = m5c
  modified_base 280: mod_base = m5c
  modified_base 282: mod_base = m5c
  modified_base 285: mod_base = m5c
  modified_base 296: mod_base = m5c
  variation 151: note = CpG site, residue is C if methylated or T(=U) if unmethylated
ggtaaggtagtttgggcgtcgttttcggtttcggggtttgcggtcggggtatcgcggtgtcgcgtttgagtcggttagttttttgcggaaattataggggcgttcggcgttgcggtcgcgtttttcggggtagcgttcgttggttggaggygtttaaattgaaagtagttttggggagagggggcggacgcgggtcgtcgagtaaggggagggggcggttcggtatagcgattttattgtttgtgttcgtcgaggggtggaattttgcggtgagttcggcgcggcgtttttttttcgagt

SEQ ID NO: 264 - DNA, 300 bp, synthetic construct
  source 1..300: mol_type = other DNA
  modified_base 2: mod_base = OTHER; note = uracil
  modified_base 17: mod_base = OTHER; note = uracil
  modified_base 22: mod_base = OTHER; note = uracil
  modified_base 27: mod_base = OTHER; note = uracil
  modified_base 29: mod_base = OTHER; note = uracil
  modified_base 31: mod_base = OTHER; note = uracil
  modified_base 34: mod_base = OTHER; note = uracil
  modified_base 41..42: mod_base = OTHER; note = uracil
  modified_base 44..47: mod_base = OTHER; note = uracil
  modified_base 56: mod_base = OTHER; note = uracil
  modified_base 58: mod_base = OTHER; note = uracil
  modified_base 62: mod_base = OTHER; note = uracil
  modified_base 73: mod_base = OTHER; note = uracil
  modified_base 78: mod_base = OTHER; note = uracil
  modified_base 83: mod_base = OTHER; note = uracil
  modified_base 86..90: mod_base = OTHER; note = uracil
  modified_base 92..95: mod_base = OTHER; note = uracil
  modified_base 99: mod_base = OTHER; note = uracil
  modified_base 107..108: mod_base = OTHER; note = uracil
  modified_base 114: mod_base = OTHER; note = uracil
  modified_base 117..121: mod_base = OTHER; note = uracil
  modified_base 123: mod_base = OTHER; note = uracil
  modified_base 125..128: mod_base = OTHER; note = uracil
  modified_base 133: mod_base = OTHER; note = uracil
  modified_base 136: mod_base = OTHER; note = uracil
  modified_base 140: mod_base = OTHER; note = uracil
  modified_base 151..152: mod_base = OTHER; note = uracil
  modified_base 154..155: mod_base = OTHER; note = uracil
  modified_base 158..159: mod_base = OTHER; note = uracil
  modified_base 168: mod_base = OTHER; note = uracil
  modified_base 171..173: mod_base = OTHER; note = uracil
  modified_base 186: mod_base = OTHER; note = uracil
  modified_base 189: mod_base = OTHER; note = uracil
  modified_base 194: mod_base = OTHER; note = uracil
  modified_base 201..204: mod_base = OTHER; note = uracil
  modified_base 213: mod_base = OTHER; note = uracil
  modified_base 216: mod_base = OTHER; note = uracil
  modified_base 223: mod_base = OTHER; note = uracil
  modified_base 227: mod_base = OTHER; note = uracil
  modified_base 231: mod_base = OTHER; note = uracil
  modified_base 233: mod_base = OTHER; note = uracil
  modified_base 242: mod_base = OTHER; note = uracil
  modified_base 244: mod_base = OTHER; note = uracil
  modified_base 252..254: mod_base = OTHER; note = uracil
  modified_base 258: mod_base = OTHER; note = uracil
  modified_base 261: mod_base = OTHER; note = uracil
  modified_base 265..267: mod_base = OTHER; note = uracil
  modified_base 273: mod_base = OTHER; note = uracil
  modified_base 285..287: mod_base = OTHER; note = uracil
  modified_base 291: mod_base = OTHER; note = uracil
  modified_base 294..295: mod_base = OTHER; note = uracil
  modified_base 299..300: mod_base = OTHER; note = uracil
  modified_base 4: mod_base = m5c
  modified_base 15: mod_base = m5c
  modified_base 18: mod_base = m5c
  modified_base 20: mod_base = m5c
  modified_base 23: mod_base = m5c
  modified_base 32: mod_base = m5c
  modified_base 49: mod_base = m5c
  modified_base 52: mod_base = m5c
  modified_base 71: mod_base = m5c
  modified_base 79: mod_base = m5c
  modified_base 84: mod_base = m5c
  modified_base 101: mod_base = m5c
  modified_base 104: mod_base = m5c
  modified_base 109: mod_base = m5c
  modified_base 111: mod_base = m5c
  modified_base 115: mod_base = m5c
  modified_base 162: mod_base = m5c
  modified_base 166: mod_base = m5c
  modified_base 174: mod_base = m5c
  modified_base 181: mod_base = m5c
  modified_base 183: mod_base = m5c
  modified_base 187: mod_base = m5c
  modified_base 192: mod_base = m5c
  modified_base 195: mod_base = m5c
  modified_base 199: mod_base = m5c
  modified_base 214: mod_base = m5c
  modified_base 228: mod_base = m5c
  modified_base 237: mod_base = m5c
  modified_base 239: mod_base = m5c
  modified_base 245: mod_base = m5c
  modified_base 247: mod_base = m5c
  modified_base 255: mod_base = m5c
  modified_base 259: mod_base = m5c
  modified_base 268: mod_base = m5c
  modified_base 274: mod_base = m5c
  modified_base 280: mod_base = m5c
  modified_base 283: mod_base = m5c
  variation 149: note = CpG site, residue is C if methylated or T(=U) if unmethylated
gttcggggagggggcgtcgcgtcgagtttatcgtaaggttttatttttcggcgggtatagataatggggtcgttgtgtcgggtcgttttttttttttgttcggcggttcgcgttcgttttttttttttaaagttgtttttaatttaaaygtttttaattagcgggcgttgtttcggggggcgcgatcgtagcgtcgagcgtttttgtaattttcgtagggagttgatcggtttaaacgcggtatcgcggtgtttcgatcgtaggtttcgagatcggagacggcgtttagattgttttgtt

SEQ ID NO: 265 - DNA, 300 bp, synthetic construct
  source 1..300: mol_type = other DNA
  modified_base 9..10: mod_base = OTHER; note = uracil
  modified_base 13: mod_base = OTHER; note = uracil
  modified_base 15: mod_base = OTHER; note = uracil
  modified_base 17: mod_base = OTHER; note = uracil
  modified_base 22: mod_base = OTHER; note = uracil
  modified_base 36: mod_base = OTHER; note = uracil
  modified_base 45..46: mod_base = OTHER; note = uracil
  modified_base 52: mod_base = OTHER; note = uracil
  modified_base 59: mod_base = OTHER; note = uracil
  modified_base 64: mod_base = OTHER; note = uracil
  modified_base 75: mod_base = OTHER; note = uracil
  modified_base 80: mod_base = OTHER; note = uracil
  modified_base 82: mod_base = OTHER; note = uracil
  modified_base 84: mod_base = OTHER; note = uracil
  modified_base 89: mod_base = OTHER; note = uracil
  modified_base 101: mod_base = OTHER; note = uracil
  modified_base 104: mod_base = OTHER; note = uracil
  modified_base 130: mod_base = OTHER; note = uracil
  modified_base 133..135: mod_base = OTHER; note = uracil
  modified_base 139: mod_base = OTHER; note = uracil
  modified_base 141..142: mod_base = OTHER; note = uracil
  modified_base 144: mod_base = OTHER; note = uracil
  modified_base 146..147: mod_base = OTHER; note = uracil
  modified_base 159: mod_base = OTHER; note = uracil
  modified_base 172: mod_base = OTHER; note = uracil
  modified_base 175..176: mod_base = OTHER; note = uracil
  modified_base 185: mod_base = OTHER; note = uracil
  modified_base 195: mod_base = OTHER; note = uracil
  modified_base 201: mod_base = OTHER; note = uracil
  modified_base 204: mod_base = OTHER; note = uracil
  modified_base 215: mod_base = OTHER; note = uracil
  modified_base 222: mod_base = OTHER; note = uracil
  modified_base 228: mod_base = OTHER; note = uracil
  modified_base 230: mod_base = OTHER; note = uracil
  modified_base 232: mod_base = OTHER; note = uracil
  modified_base 235: mod_base = OTHER; note = uracil
  modified_base 239: mod_base = OTHER; note = uracil
  modified_base 241: mod_base = OTHER; note = uracil
  modified_base 245: mod_base = OTHER; note = uracil
  modified_base 249: mod_base = OTHER; note = uracil
  modified_base 251: mod_base = OTHER; note = uracil
  modified_base 262: mod_base = OTHER; note = uracil
  modified_base 284: mod_base = OTHER; note = uracil
  modified_base 288: mod_base = OTHER; note = uracil
  modified_base 290..291: mod_base = OTHER; note = uracil
  modified_base 296: mod_base = OTHER; note = uracil
  modified_base 298: mod_base = OTHER; note = uracil
  modified_base 105: mod_base = m5c
  modified_base 120: mod_base = m5c
  modified_base 136: mod_base = m5c
  modified_base 276: mod_base = m5c
  modified_base 285: mod_base = m5c
  modified_base 294: mod_base = m5c
  variation 151: note = CpG site, residue is C if methylated or T(=U) if unmethylated
ggagggagtttgtattttgggtagtgatgtggagttagagatttttaagtttatggtgtaagtttgtgggagagtagaatttattttataaaattgttgatagtcggtgttgttagagacggaaagggataatttcggtttttttttaggygtggagtttgtggggatgtgtttttagaaaatgtagggttaagtaggagttgtagagtagaattaaatgataatgatttattgttgttattaataggttttttgtgggggttgtaggtgggaggcgatatggtcggtattttcgtataa

SEQ ID NO: 266 - DNA, 300 bp, synthetic construct
  source 1..300: mol_type = other DNA
  modified_base 14: mod_base = OTHER; note = uracil
  modified_base 18..19: mod_base = OTHER; note = uracil
  modified_base 26..27: mod_base = OTHER; note = uracil
  modified_base 29..31: mod_base = OTHER; note = uracil
  modified_base 33..34: mod_base = OTHER; note = uracil
  modified_base 37: mod_base = OTHER; note = uracil
  modified_base 40..44: mod_base = OTHER; note = uracil
  modified_base 46: mod_base = OTHER; note = uracil
  modified_base 53..54: mod_base = OTHER; note = uracil
  modified_base 64: mod_base = OTHER; note = uracil
  modified_base 67: mod_base = OTHER; note = uracil
  modified_base 75: mod_base = OTHER; note = uracil
  modified_base 81: mod_base = OTHER; note = uracil
  modified_base 90: mod_base = OTHER; note = uracil
  modified_base 93: mod_base = OTHER; note = uracil
  modified_base 95: mod_base = OTHER; note = uracil
  modified_base 98: mod_base = OTHER; note = uracil
  modified_base 101: mod_base = OTHER; note = uracil
  modified_base 103..104: mod_base = OTHER; note = uracil
  modified_base 107: mod_base = OTHER; note = uracil
  modified_base 112..114: mod_base = OTHER; note = uracil
  modified_base 117: mod_base = OTHER; note = uracil
  modified_base 123: mod_base = OTHER; note = uracil
  modified_base 130: mod_base = OTHER; note = uracil
  modified_base 132: mod_base = OTHER; note = uracil
  modified_base 135..138: mod_base = OTHER; note = uracil
  modified_base 140: mod_base = OTHER; note = uracil
  modified_base 144: mod_base = OTHER; note = uracil
  modified_base 146..147: mod_base = OTHER; note = uracil
  modified_base 151..152: mod_base = OTHER; note = uracil
  modified_base 163: mod_base = OTHER; note = uracil
  modified_base 173..175: mod_base = OTHER; note = uracil
  modified_base 179: mod_base = OTHER; note = uracil
  modified_base 183: mod_base = OTHER; note = uracil
  modified_base 185: mod_base = OTHER; note = uracil
  modified_base 189: mod_base = OTHER; note = uracil
  modified_base 192: mod_base = OTHER; note = uracil
  modified_base 194: mod_base = OTHER; note = uracil
  modified_base 198: mod_base = OTHER; note = uracil
  modified_base 202: mod_base = OTHER; note = uracil
  modified_base 205: mod_base = OTHER; note = uracil
  modified_base 224: mod_base = OTHER; note = uracil
  modified_base 227: mod_base = OTHER; note = uracil
  modified_base 229: mod_base = OTHER; note = uracil
  modified_base 231..233: mod_base = OTHER; note = uracil
  modified_base 235: mod_base = OTHER; note = uracil
  modified_base 239: mod_base = OTHER; note = uracil
  modified_base 243: mod_base = OTHER; note = uracil
  modified_base 245..246: mod_base = OTHER; note = uracil
  modified_base 252: mod_base = OTHER; note = uracil
  modified_base 261: mod_base = OTHER; note = uracil
  modified_base 263: mod_base = OTHER; note = uracil
  modified_base 267: mod_base = OTHER; note = uracil
  modified_base 269..270: mod_base = OTHER; note = uracil
  modified_base 272: mod_base = OTHER; note = uracil
  modified_base 275: mod_base = OTHER; note = uracil
  modified_base 277: mod_base = OTHER; note = uracil
  modified_base 280..282: mod_base = OTHER; note = uracil
  modified_base 289: mod_base = OTHER; note = uracil
  modified_base 293: mod_base = OTHER; note = uracil
  modified_base 295..297: mod_base = OTHER; note = uracil
  modified_base 299..300: mod_base = OTHER; note = uracil
  modified_base 6: mod_base = m5c
  modified_base 15: mod_base = m5c
  modified_base 24: mod_base = m5c
  modified_base 164: mod_base = m5c
  modified_base 180: mod_base = m5c
  modified_base 195: mod_base = m5c
  variation 149: note = CpG site, residue is C if methylated or T(=U) if unmethylated
ttgtgcgaaggtgtcggttatatcgttttttatttatagtttttataaagagtttgttagtgatagtagtgagttattgttatttgattttattttgtagtttttgtttaattttgtattttttggaagtatatttttatagattttaygtttggagaggagtcggggttgttttttttcgtttttaataatatcggttgttaataattttgtaaagtgagttttgtttttttatagatttgtattatgaatttggaaatttttgattttatattattgtttagagtgtaggtttttttt

SEQ ID NO: 267 - DNA, 300 bp, synthetic construct
  source 1..300: mol_type = other DNA
  modified_base 4: mod_base = OTHER; note = uracil
  modified_base 13: mod_base = OTHER; note = uracil
  modified_base 24: mod_base = OTHER; note = uracil
  modified_base 28: mod_base = OTHER; note = uracil
  modified_base 32..33: mod_base = OTHER; note = uracil
  modified_base 35: mod_base = OTHER; note = uracil
  modified_base 37: mod_base = OTHER; note = uracil
  modified_base 39: mod_base = OTHER; note = uracil
  modified_base 41: mod_base = OTHER; note = uracil
  modified_base 47: mod_base = OTHER; note = uracil
  modified_base 49..50: mod_base = OTHER; note = uracil
  modified_base 59..60: mod_base = OTHER; note = uracil
  modified_base 71: mod_base = OTHER; note = uracil
  modified_base 74: mod_base = OTHER; note = uracil
  modified_base 76: mod_base = OTHER; note = uracil
  modified_base 80: mod_base = OTHER; note = uracil
  modified_base 82: mod_base = OTHER; note = uracil
  modified_base 84: mod_base = OTHER; note = uracil
  modified_base 93..94: mod_base = OTHER; note = uracil
  modified_base 97: mod_base = OTHER; note = uracil
  modified_base 106..107: mod_base = OTHER; note = uracil
  modified_base 122: mod_base = OTHER; note = uracil
  modified_base 124: mod_base = OTHER; note = uracil
  modified_base 130: mod_base = OTHER; note = uracil
  modified_base 133: mod_base = OTHER; note = uracil
  modified_base 135: mod_base = OTHER; note = uracil
  modified_base 137: mod_base = OTHER; note = uracil
  modified_base 140..141: mod_base = OTHER; note = uracil
  modified_base 144..145: mod_base = OTHER; note = uracil
  modified_base 167..168: mod_base = OTHER; note = uracil
  modified_base 170..171: mod_base = OTHER; note = uracil
  modified_base 175..176: mod_base = OTHER; note = uracil
  modified_base 183..184: mod_base = OTHER; note = uracil
  modified_base 191: mod_base = OTHER; note = uracil
  modified_base 200..201: mod_base = OTHER; note = uracil
  modified_base 221: mod_base = OTHER; note = uracil
  modified_base 228: mod_base = OTHER; note = uracil
  modified_base 233: mod_base = OTHER; note = uracil
  modified_base 235: mod_base = OTHER; note = uracil
  modified_base 243: mod_base = OTHER; note = uracil
  modified_base 248: mod_base = OTHER; note = uracil
  modified_base 250: mod_base = OTHER; note = uracil
  modified_base 257: mod_base = OTHER; note = uracil
  modified_base 259: mod_base = OTHER; note = uracil
  modified_base 262: mod_base = OTHER; note = uracil
  modified_base 276..277: mod_base = OTHER; note = uracil
  modified_base 281..282: mod_base = OTHER; note = uracil
  modified_base 287: mod_base = OTHER; note = uracil
  modified_base 292: mod_base = OTHER; note = uracil
  modified_base 295: mod_base = OTHER; note = uracil
  modified_base 10: mod_base = m5c
  modified_base 21: mod_base = m5c
  modified_base 85: mod_base = m5c
  modified_base 101: mod_base = m5c
  modified_base 116: mod_base = m5c
  modified_base 146: mod_base = m5c
  modified_base 185: mod_base = m5c
  modified_base 215: mod_base = m5c
  variation 149: note = CpG site, residue is C if methylated or T(=U) if unmethylated
gttttggttcggtagagtggcggtaattttgtttttttttttagaatatttaaagaagttagtgagtgagttgtttatgtatatcggggagatttatagacggatttaggaggagcgggagtttattgattgtatatttttaattcggygtgataggaaagtgaggttatttgttttaagtgttcgggggtaggggggtttatggaggagggggcgggggtaggtgtttggatatagggatgttggttttaggtggtatagttggggagaaaaaatttatttattgtaaaatattattag

SEQ ID NO: 268 - DNA, 300 bp, synthetic construct
  source 1..300: mol_type = other DNA
  modified_base 14: mod_base = OTHER; note = uracil
  modified_base 31: mod_base = OTHER; note = uracil
  modified_base 33..36: mod_base = OTHER; note = uracil
  modified_base 39: mod_base = OTHER; note = uracil
  modified_base 44..45: mod_base = OTHER; note = uracil
  modified_base 47..48: mod_base = OTHER; note = uracil
  modified_base 54..55: mod_base = OTHER; note = uracil
  modified_base 58: mod_base = OTHER; note = uracil
  modified_base 61..63: mod_base = OTHER; note = uracil
  modified_base 69..70: mod_base = OTHER; note = uracil
  modified_base 74: mod_base = OTHER; note = uracil
  modified_base 76..77: mod_base = OTHER; note = uracil
  modified_base 80..83: mod_base = OTHER; note = uracil
  modified_base 86..90: mod_base = OTHER; note = uracil
  modified_base 92..93: mod_base = OTHER; note = uracil
  modified_base 95..96: mod_base = OTHER; note = uracil
  modified_base 102..107: mod_base = OTHER; note = uracil
  modified_base 110..113: mod_base = OTHER; note = uracil
  modified_base 118: mod_base = OTHER; note = uracil
  modified_base 120: mod_base = OTHER; note = uracil
  modified_base 127: mod_base = OTHER; note = uracil
  modified_base 134..135: mod_base = OTHER; note = uracil
  modified_base 137: mod_base = OTHER; note = uracil
  modified_base 139: mod_base = OTHER; note = uracil
  modified_base 143..144: mod_base = OTHER; note = uracil
  modified_base 148: mod_base = OTHER; note = uracil
  modified_base 152: mod_base = OTHER; note = uracil
  modified_base 168: mod_base = OTHER; note = uracil
  modified_base 172: mod_base = OTHER; note = uracil
  modified_base 179: mod_base = OTHER; note = uracil
  modified_base 181..182: mod_base = OTHER; note = uracil
  modified_base 185: mod_base = OTHER; note = uracil
  modified_base 187..188: mod_base = OTHER; note = uracil
  modified_base 190..191: mod_base = OTHER; note = uracil
  modified_base 197: mod_base = OTHER; note = uracil
  modified_base 201: mod_base = OTHER; note = uracil
  modified_base 209: mod_base = OTHER; note = uracil
  modified_base 211..213: mod_base = OTHER; note = uracil
  modified_base 221: mod_base = OTHER; note = uracil
  modified_base 227: mod_base = OTHER; note = uracil
  modified_base 230: mod_base = OTHER; note = uracil
  modified_base 232: mod_base = OTHER; note = uracil
  modified_base 234: mod_base = OTHER; note = uracil
  modified_base 236: mod_base = OTHER; note = uracil
  modified_base 238: mod_base = OTHER; note = uracil
  modified_base 242: mod_base = OTHER; note = uracil
  modified_base 245: mod_base = OTHER; note = uracil
  modified_base 256: mod_base = OTHER; note = uracil
  modified_base 269: mod_base = OTHER; note = uracil
  modified_base 277: mod_base = OTHER; note = uracil
  modified_base 280..281: mod_base = OTHER; note = uracil
  modified_base 283: mod_base = OTHER; note = uracil
  modified_base 285: mod_base = OTHER; note = uracil
  modified_base 288: mod_base = OTHER; note = uracil
  modified_base 293..294: mod_base = OTHER; note = uracil
  modified_base 299: mod_base = OTHER; note = uracil
  modified_base 84: mod_base = m5c
  modified_base 114: mod_base = m5c
  modified_base 153: mod_base = m5c
  modified_base 183: mod_base = m5c
  modified_base 198: mod_base = m5c
  modified_base 214: mod_base = m5c
  modified_base 278: mod_base = m5c
  modified_base 289: mod_base = m5c
  variation 150: note = CpG site, residue is C if methylated or T(=U) if unmethylated
taatgatgttttgtaatggataggttttttttttttagttgtgttatttgagattagtatttttgtgtttagatatttgttttcgtttttttttttatggatttttttgttttcgggtatttaggataggtggttttatttttttattaygtcgggttggaagtgtgtagttaatgagttttcgttttttttggattcgtttgtaggttttttcggtgtgtatgagtagtttatttattggtttttttaggtgttttagagagagaggtaagattgtcgttattttgtcgaattagaata

SEQ ID NO: 269 - DNA, 300 bp, synthetic construct
  source 1..300: mol_type = other DNA
  modified_base 7: mod_base = OTHER; note = uracil
  modified_base 13: mod_base = OTHER; note = uracil
  modified_base 20: mod_base = OTHER; note = uracil
  modified_base 23: mod_base = OTHER; note = uracil
  modified_base 25..28: mod_base = OTHER; note = uracil
  modified_base 30..31: mod_base = OTHER; note = uracil
  modified_base 33..35: mod_base = OTHER; note = uracil
  modified_base 37: mod_base = OTHER; note = uracil
  modified_base 39: mod_base = OTHER; note = uracil
  modified_base 44: mod_base = OTHER; note = uracil
  modified_base 51..52: mod_base = OTHER; note = uracil
  modified_base 54: mod_base = OTHER; note = uracil
  modified_base 66..67: mod_base = OTHER; note = uracil
  modified_base 73..74: mod_base = OTHER; note = uracil
  modified_base 79..80: mod_base = OTHER; note = uracil
  modified_base 85..86: mod_base = OTHER; note = uracil
  modified_base 88..89: mod_base = OTHER; note = uracil
  modified_base 96: mod_base = OTHER; note = uracil
  modified_base 99..101: mod_base = OTHER; note = uracil
  modified_base 108: mod_base = OTHER; note = uracil
  modified_base 112: mod_base = OTHER; note = uracil
  modified_base 119: mod_base = OTHER; note = uracil
  modified_base 125: mod_base = OTHER; note = uracil
  modified_base 128: mod_base = OTHER; note = uracil
  modified_base 131..132: mod_base = OTHER; note = uracil
  modified_base 137..138: mod_base = OTHER; note = uracil
  modified_base 141: mod_base = OTHER; note = uracil
  modified_base 160..161: mod_base = OTHER; note = uracil
  modified_base 172..173: mod_base = OTHER; note = uracil
  modified_base 178: mod_base = OTHER; note = uracil
  modified_base 183: mod_base = OTHER; note = uracil
  modified_base 185: mod_base = OTHER; note = uracil
  modified_base 189: mod_base = OTHER; note = uracil
  modified_base 198: mod_base = OTHER; note = uracil
  modified_base 200: mod_base = OTHER; note = uracil
  modified_base 204..205: mod_base = OTHER; note = uracil
  modified_base 217: mod_base = OTHER; note = uracil
  modified_base 230..231: mod_base = OTHER; note = uracil
  modified_base 247: mod_base = OTHER; note = uracil
  modified_base 253..254: mod_base = OTHER; note = uracil
  modified_base 256: mod_base = OTHER; note = uracil
  modified_base 267: mod_base = OTHER; note = uracil
  modified_base 269: mod_base = OTHER; note = uracil
  modified_base 272..273: mod_base = OTHER; note = uracil
  modified_base 283: mod_base = OTHER; note = uracil
  modified_base 286: mod_base = OTHER; note = uracil
  modified_base 290: mod_base = OTHER; note = uracil
  modified_base 292: mod_base = OTHER; note = uracil
  modified_base 296: mod_base = OTHER; note = uracil
  modified_base 299..300: mod_base = OTHER; note = uracil
  modified_base 1: mod_base = m5c
  modified_base 113: mod_base = m5c
  modified_base 116: mod_base = m5c
  modified_base 174: mod_base = m5c
  modified_base 186: mod_base = m5c
  modified_base 202: mod_base = m5c
  modified_base 275: mod_base = m5c
  variation 150: note = CpG site, residue is C if methylated or T(=U) if unmethylated
cgtgattagagatagaaattagtttttttttttttttattgagtttgtagttattttaagtataatttgtgttttgtgttagttttattataaattagttttgagttttattcggcggtttattttgttgttaaaatttttattagttgygggaatgggttagggagagagttcggattttatttcggttgtggtgatttacgtttttgggaagggttgaggtatttgtttttggatgtggggatgttgtggtttttggttgggaatatagtttcgttttgtttgttggttttggttttt

SEQ ID NO: 270 - DNA, 300 bp, synthetic construct
  source 1..300: mol_type = other DNA
  modified_base 6..7: mod_base = OTHER; note = uracil
  modified_base 12..13: mod_base = OTHER; note = uracil
  modified_base 16: mod_base = OTHER; note = uracil
  modified_base 20: mod_base = OTHER; note = uracil
  modified_base 30: mod_base = OTHER; note = uracil
  modified_base 37..39: mod_base = OTHER; note = uracil
  modified_base 42..43: mod_base = OTHER; note = uracil
  modified_base 49..50: mod_base = OTHER; note = uracil
  modified_base 52: mod_base = OTHER; note = uracil
  modified_base 55: mod_base = OTHER; note = uracil
  modified_base 58..61: mod_base = OTHER; note = uracil
  modified_base 63: mod_base = OTHER; note = uracil
  modified_base 66..67: mod_base = OTHER; note = uracil
  modified_base 73: mod_base = OTHER; note = uracil
  modified_base 79..80: mod_base = OTHER; note = uracil
  modified_base 82: mod_base = OTHER; note = uracil
  modified_base 85..87: mod_base = OTHER; note = uracil
  modified_base 90..92: mod_base = OTHER; note = uracil
  modified_base 105: mod_base = OTHER; note = uracil
  modified_base 107..108: mod_base = OTHER; note = uracil
  modified_base 110: mod_base = OTHER; note = uracil
  modified_base 113: mod_base = OTHER; note = uracil
  modified_base 125: mod_base = OTHER; note = uracil
  modified_base 130: mod_base = OTHER; note = uracil
  modified_base 132: mod_base = OTHER; note = uracil
  modified_base 134: mod_base = OTHER; note = uracil
  modified_base 136..138: mod_base = OTHER; note = uracil
  modified_base 142..144: mod_base = OTHER; note = uracil
  modified_base 148..149: mod_base = OTHER; note = uracil
  modified_base 152: mod_base = OTHER; note = uracil
  modified_base 155: mod_base = OTHER; note = uracil
  modified_base 171: mod_base = OTHER; note = uracil
  modified_base 174: mod_base = OTHER; note = uracil
  modified_base 183: mod_base = OTHER; note = uracil
  modified_base 186: mod_base = OTHER; note = uracil
  modified_base 196: mod_base = OTHER; note = uracil
  modified_base 198: mod_base = OTHER; note = uracil
  modified_base 203: mod_base = OTHER; note = uracil
  modified_base 219: mod_base = OTHER; note = uracil
  modified_base 223: mod_base = OTHER; note = uracil
  modified_base 225: mod_base = OTHER; note = uracil
  modified_base 230: mod_base = OTHER; note = uracil
  modified_base 232: mod_base = OTHER; note = uracil
  modified_base 241: mod_base = OTHER; note = uracil
  modified_base 251: mod_base = OTHER; note = uracil
  modified_base 254: mod_base = OTHER; note = uracil
  modified_base 258: mod_base = OTHER; note = uracil
  modified_base 260: mod_base = OTHER; note = uracil
  modified_base 279: mod_base = OTHER; note = uracil
  modified_base 286: mod_base = OTHER; note = uracil
  modified_base 290: mod_base = OTHER; note = uracil
  modified_base 292: mod_base = OTHER; note = uracil
  modified_base 297: mod_base = OTHER; note = uracil
  modified_base 25: mod_base = m5c
  modified_base 98: mod_base = m5c
  modified_base 114: mod_base = m5c
  modified_base 126: mod_base = m5c
  modified_base 184: mod_base = m5c
  modified_base 187: mod_base = m5c
  modified_base 299: mod_base = m5c
  variation 150: note = CpG site, residue is C if methylated or T(=U) if unmethylated
ggaagttagagttagtagataaaacgaggttgtgtttttaattagaggttatagtatttttatatttaaggataaatattttagttttttttaaaggcgtgagttattatagtcggagtaaagttcgggttttttttttggtttattttygtaattaatgaaggttttggtagtagaataagtcgtcggatagaatttagggttgatttatggtggaattggtataggatataggttatatttaaagtggttataagtttagtgagggaggaggggagttgatttttgtttttgattacg

SEQ ID NO: 271 - DNA, 300 bp, synthetic construct
  source 1..300: mol_type = other DNA
  modified_base 1: mod_base = OTHER; note = uracil
  modified_base 8: mod_base = OTHER; note = uracil
  modified_base 15..16: mod_base = OTHER; note = uracil
  modified_base 25: mod_base = OTHER; note = uracil
  modified_base 28: mod_base = OTHER; note = uracil
  modified_base 33..35: mod_base = OTHER; note = uracil
  modified_base 39..40: mod_base = OTHER; note = uracil
  modified_base 45: mod_base = OTHER; note = uracil
  modified_base 50: mod_base = OTHER; note = uracil
  modified_base 53..54: mod_base = OTHER; note = uracil
  modified_base 57..58: mod_base = OTHER; note = uracil
  modified_base 61: mod_base = OTHER; note = uracil
  modified_base 65: mod_base = OTHER; note = uracil
  modified_base 67: mod_base = OTHER; note = uracil
  modified_base 78: mod_base = OTHER; note = uracil
  modified_base 83: mod_base = OTHER; note = uracil
  modified_base 85: mod_base = OTHER; note = uracil
  modified_base 88: mod_base = OTHER; note = uracil
  modified_base 91..93: mod_base = OTHER; note = uracil
  modified_base 95: mod_base = OTHER; note = uracil
  modified_base 100: mod_base = OTHER; note = uracil
  modified_base 102..103: mod_base = OTHER; note = uracil
  modified_base 106: mod_base = OTHER; note = uracil
  modified_base 108..109: mod_base = OTHER; note = uracil
  modified_base 114: mod_base = OTHER; note = uracil
  modified_base 118: mod_base = OTHER; note = uracil
  modified_base 122: mod_base = OTHER; note = uracil
  modified_base 127: mod_base = OTHER; note = uracil
  modified_base 132: mod_base = OTHER; note = uracil
  modified_base 135: mod_base = OTHER; note = uracil
  modified_base 141..142: mod_base = OTHER; note = uracil
  modified_base 145: mod_base = OTHER; note = uracil
  modified_base 148..149: mod_base = OTHER; note = uracil
  modified_base 153: mod_base = OTHER; note = uracil
  modified_base 159: mod_base = OTHER; note = uracil
  modified_base 163: mod_base = OTHER; note = uracil
  modified_base 166: mod_base = OTHER; note = uracil
  modified_base 170: mod_base = OTHER; note = uracil
  modified_base 178: mod_base = OTHER; note = uracil
  modified_base 180..181: mod_base = OTHER; note = uracil
  modified_base 185: mod_base = OTHER; note = uracil
  modified_base 187: mod_base = OTHER; note = uracil
  modified_base 201: mod_base = OTHER; note = uracil
  modified_base 203: mod_base = OTHER; note = uracil
  modified_base 213: mod_base = OTHER; note = uracil
  modified_base 220: mod_base = OTHER; note = uracil
  modified_base 225..227: mod_base = OTHER; note = uracil
  modified_base 242: mod_base = OTHER; note = uracil
  modified_base 247..248: mod_base = OTHER; note = uracil
  modified_base 252: mod_base = OTHER; note = uracil
  modified_base 263: mod_base = OTHER; note = uracil
  modified_base 269: mod_base = OTHER; note = uracil
  modified_base 272: mod_base = OTHER; note = uracil
  modified_base 288: mod_base = OTHER; note = uracil
  modified_base 298: mod_base = OTHER; note = uracil
  modified_base 68: mod_base = m5c
  modified_base 71: mod_base = m5c
  modified_base 96: mod_base = m5c
  modified_base 188: mod_base = m5c
  variation 151: note = CpG site, residue is C if methylated or T(=U) if unmethylated
tagtatgtatgtgtttatttaaggtatttgagttttggtttttgttgttttttttttttttttttttcgtcgggttgttgagtttaatattttatcgggtttttgttttttagttagtagttagtgtagagttgttgggtttttttgtttygtttgggtaggtttttgttaatgagttattaagtatcgggaaataagtgtataggaaggagtaggtggtaagattttgtggaggtagagatagttttatttagtgagtgagttgtgattgtaaatttgggaaggttttgggggaagtaa

SEQ ID NO: 272 - DNA, 300 bp, synthetic construct
  source 1..300: mol_type = other DNA
  modified_base 4: mod_base = OTHER; note = uracil
  modified_base 7..11: mod_base = OTHER; note = uracil
  modified_base 16..17: mod_base = OTHER; note = uracil
  modified_base 20..22: mod_base = OTHER; note = uracil
  modified_base 30: mod_base = OTHER; note = uracil
  modified_base 34: mod_base = OTHER; note = uracil
  modified_base 36: mod_base = OTHER; note = uracil
  modified_base 39: mod_base = OTHER; note = uracil
  modified_base 41: mod_base = OTHER; note = uracil
  modified_base 43: mod_base = OTHER; note = uracil
  modified_base 45: mod_base = OTHER; note = uracil
  modified_base 47: mod_base = OTHER; note = uracil
  modified_base 57: mod_base = OTHER; note = uracil
  modified_base 61: mod_base = OTHER; note = uracil
  modified_base 63: mod_base = OTHER; note = uracil
  modified_base 66..67: mod_base = OTHER; note = uracil
  modified_base 69..70: mod_base = OTHER; note = uracil
  modified_base 72: mod_base = OTHER; note = uracil
  modified_base 78: mod_base = OTHER; note = uracil
  modified_base 82..83: mod_base = OTHER; note = uracil
  modified_base 85..86: mod_base = OTHER; note = uracil
  modified_base 89: mod_base = OTHER; note = uracil
  modified_base 91..92: mod_base = OTHER; note = uracil
  modified_base 95..96: mod_base = OTHER; note = uracil
  modified_base 101: mod_base = OTHER; note = uracil
  modified_base 103: mod_base = OTHER; note = uracil
  modified_base 110..111: mod_base = OTHER; note = uracil
  modified_base 117: mod_base = OTHER; note = uracil
  modified_base 125: mod_base = OTHER; note = uracil
  modified_base 127: mod_base = OTHER; note = uracil
  modified_base 133: mod_base = OTHER; note = uracil
  modified_base 139..140: mod_base = OTHER; note = uracil
  modified_base 143..145: mod_base = OTHER; note = uracil
  modified_base 154: mod_base = OTHER; note = uracil
  modified_base 162..164: mod_base = OTHER; note = uracil
  modified_base 167: mod_base = OTHER; note = uracil
  modified_base 170: mod_base = OTHER; note = uracil
  modified_base 172: mod_base = OTHER; note = uracil
  modified_base 175: mod_base = OTHER; note = uracil
  modified_base 177: mod_base = OTHER; note = uracil
  modified_base 181: mod_base = OTHER; note = uracil
  modified_base 184: mod_base = OTHER; note = uracil
  modified_base 188: mod_base = OTHER; note = uracil
  modified_base 196: mod_base = OTHER; note = uracil
  modified_base 202..203: mod_base = OTHER; note = uracil
  modified_base 219: mod_base = OTHER; note = uracil
  modified_base 221: mod_base = OTHER; note = uracil
  modified_base 224: mod_base = OTHER; note = uracil
  modified_base 227..228: mod_base = OTHER; note = uracil
  modified_base 254: mod_base = OTHER; note = uracil
  modified_base 257: mod_base = OTHER; note = uracil
  modified_base 263..264: mod_base = OTHER; note = uracil
  modified_base 269: mod_base = OTHER; note = uracil
  modified_base 271: mod_base = OTHER; note = uracil
  modified_base 277..278: mod_base = OTHER; note = uracil
  modified_base 288: mod_base = OTHER; note = uracil
  modified_base 290: mod_base = OTHER; note = uracil
  modified_base 294: mod_base = OTHER; note = uracil
  modified_base 298: mod_base = OTHER; note = uracil
  modified_base 112: mod_base = m5c
  modified_base 204: mod_base = m5c
  modified_base 229: mod_base = m5c
  modified_base 232: mod_base = m5c
  variation 149: note = CpG site, residue is C if methylated or T(=U) if unmethylated
ttgttttttttagaatttttttaaatttgtagttatagtttatttattgaatggaattgtttttatttttatagggttttgttatttgtttttttttgtgtatttatttttcggtgtttggtgatttattgatagaagtttgtttaagygaggtagaaggatttagtagttttgtattgattgttagttaaggagtaggagttcggtgggatgttgagtttagtaattcgacggagaaagaaggaaggaagaatagtaaaggttagggtttagatgttttaaatggatatatgtatattg

SEQ ID NO: 273 - DNA, 300 bp, synthetic construct
  source 1..300: mol_type = other DNA
  modified_base 4: mod_base = OTHER; note = uracil
  modified_base 16..17: mod_base = OTHER; note = uracil
  modified_base 31..32: mod_base = OTHER; note = uracil
  modified_base 34: mod_base = OTHER; note = uracil
  modified_base 36: mod_base = OTHER; note = uracil
  modified_base 50: mod_base = OTHER; note = uracil
  modified_base 58: mod_base = OTHER; note = uracil
  modified_base 61: mod_base = OTHER; note = uracil
  modified_base 89..91: mod_base = OTHER; note = uracil
  modified_base 96: mod_base = OTHER; note = uracil
  modified_base 106: mod_base = OTHER; note = uracil
  modified_base 109: mod_base = OTHER; note = uracil
  modified_base 116..118: mod_base = OTHER; note = uracil
  modified_base 124..125: mod_base = OTHER; note = uracil
  modified_base 127: mod_base = OTHER; note = uracil
  modified_base 136: mod_base = OTHER; note = uracil
  modified_base 157: mod_base = OTHER; note = uracil
  modified_base 160: mod_base = OTHER; note = uracil
  modified_base 162..163: mod_base = OTHER; note = uracil
  modified_base 167: mod_base = OTHER; note = uracil
  modified_base 172: mod_base = OTHER; note = uracil
  modified_base 180..181: mod_base = OTHER; note = uracil
  modified_base 189..191: mod_base = OTHER; note = uracil
  modified_base 202: mod_base = OTHER; note = uracil
  modified_base 205..206: mod_base = OTHER; note = uracil
  modified_base 214: mod_base = OTHER; note = uracil
  modified_base 216: mod_base = OTHER; note = uracil
  modified_base 219..220: mod_base = OTHER; note = uracil
  modified_base 227: mod_base = OTHER; note = uracil
  modified_base 233..235: mod_base = OTHER; note = uracil
  modified_base 239: mod_base = OTHER; note = uracil
  modified_base 245..246: mod_base = OTHER; note = uracil
  modified_base 253: mod_base = OTHER; note = uracil
  modified_base 259: mod_base = OTHER; note = uracil
  modified_base 270: mod_base = OTHER; note = uracil
  modified_base 276: mod_base = OTHER; note = uracil
  modified_base 281: mod_base = OTHER; note = uracil
  modified_base 288: mod_base = OTHER; note = uracil
  modified_base 293: mod_base = OTHER; note = uracil
  modified_base 299..300: mod_base = OTHER; note = uracil
  modified_base 1: mod_base = m5c
  modified_base 5: mod_base = m5c
  modified_base 7: mod_base = m5c
  modified_base 14: mod_base = m5c
  modified_base 37: mod_base = m5c
  modified_base 55: mod_base = m5c
  modified_base 59: mod_base = m5c
  modified_base 62: mod_base = m5c
  modified_base 74: mod_base = m5c
  modified_base 93: mod_base = m5c
  modified_base 98: mod_base = m5c
  modified_base 101: mod_base = m5c
  modified_base 107: mod_base = m5c
  modified_base 110: mod_base = m5c
  modified_base 114: mod_base = m5c
  modified_base 138: mod_base = m5c
  modified_base 141: mod_base = m5c
  modified_base 168: mod_base = m5c
  modified_base 175: mod_base = m5c
  modified_base 182: mod_base = m5c
  modified_base 184: mod_base = m5c
  modified_base 199: mod_base = m5c
  modified_base 209: mod_base = m5c
  modified_base 211: mod_base = m5c
  modified_base 221: mod_base = m5c
  modified_base 230: mod_base = m5c
  modified_base 237: mod_base = m5c
  modified_base 240: mod_base = m5c
  modified_base 249: mod_base = m5c
  modified_base 261: mod_base = m5c
  modified_base 277: mod_base = m5c
  modified_base 282: mod_base = m5c
  modified_base 291: mod_base = m5c
  variation 151: note = CpG site, residue is C if methylated or T(=U) if unmethylated
cggtcgcggggggcgtttggaggagggaagttttttcggaggagaagagttgggcggtcgtcgtaggaggaagcggaaagataaggggttttcggttcggcggggtcgtcggacgtttaggagttttaatggggatacgtcgggtggggayggaggtagtttttgttcggatagcgaaattcgcgaggtttaggagagcggtagttagcgcggtatagttcgggagttgcggtttacgtcggagtttacggatatgggttcggaagggataaaaatcgggtcggagttagcgttggagtt

SEQ ID NO: 274 - DNA, 300 bp, synthetic construct
  source 1..300: mol_type = other DNA
  modified_base 3: mod_base = OTHER; note = uracil
  modified_base 5..6: mod_base = OTHER; note = uracil
  modified_base 11: mod_base = OTHER; note = uracil
  modified_base 15: mod_base = OTHER; note = uracil
  modified_base 17: mod_base = OTHER; note = uracil
  modified_base 21..22: mod_base = OTHER; note = uracil
  modified_base 33..35: mod_base = OTHER; note = uracil
  modified_base 38: mod_base = OTHER; note = uracil
  modified_base 43..45: mod_base = OTHER; note = uracil
  modified_base 50: mod_base = OTHER; note = uracil
  modified_base 57: mod_base = OTHER; note = uracil
  modified_base 59: mod_base = OTHER; note = uracil
  modified_base 69: mod_base = OTHER; note = uracil
  modified_base 72: mod_base = OTHER; note = uracil
  modified_base 75: mod_base = OTHER; note = uracil
  modified_base 77..78: mod_base = OTHER; note = uracil
  modified_base 83: mod_base = OTHER; note = uracil
  modified_base 88: mod_base = OTHER; note = uracil
  modified_base 93: mod_base = OTHER; note = uracil
  modified_base 97: mod_base = OTHER; note = uracil
  modified_base 100: mod_base = OTHER; note = uracil
  modified_base 103: mod_base = OTHER; note = uracil
  modified_base 105: mod_base = OTHER; note = uracil
  modified_base 107..108: mod_base = OTHER; note = uracil
  modified_base 113..114: mod_base = OTHER; note = uracil
  modified_base 127: mod_base = OTHER; note = uracil
  modified_base 131: mod_base = OTHER; note = uracil
  modified_base 136: mod_base = OTHER; note = uracil
  modified_base 142: mod_base = OTHER; note = uracil
  modified_base 145..146: mod_base = OTHER; note = uracil
  modified_base 148: mod_base = OTHER; note = uracil
  modified_base 152..155: mod_base = OTHER; note = uracil
  modified_base 157..158: mod_base = OTHER; note = uracil
  modified_base 167..170: mod_base = OTHER; note = uracil
  modified_base 178: mod_base = OTHER; note = uracil
  modified_base 180..181: mod_base = OTHER; note = uracil
  modified_base 189: mod_base = OTHER; note = uracil
  modified_base 196..198: mod_base = OTHER; note = uracil
  modified_base 201: mod_base = OTHER; note = uracil
  modified_base 206: mod_base = OTHER; note = uracil
  modified_base 213..216: mod_base = OTHER; note = uracil
  modified_base 221: mod_base = OTHER; note = uracil
  modified_base 225: mod_base = OTHER; note = uracil
  modified_base 228: mod_base = OTHER; note = uracil
  modified_base 231..232: mod_base = OTHER; note = uracil
  modified_base 234..235: mod_base = OTHER; note = uracil
  modified_base 244: mod_base = OTHER; note = uracil
  modified_base 247..249: mod_base = OTHER; note = uracil
  modified_base 252: mod_base = OTHER; note = uracil
  modified_base 254: mod_base = OTHER; note = uracil
  modified_base 257: mod_base = OTHER; note = uracil
  modified_base 259..260: mod_base = OTHER; note = uracil
  modified_base 262: mod_base = OTHER; note = uracil
  modified_base 271: mod_base = OTHER; note = uracil
  modified_base 274..276: mod_base = OTHER; note = uracil
  modified_base 278..279: mod_base = OTHER; note = uracil
  modified_base 281..282: mod_base = OTHER; note = uracil
  modified_base 288..292: mod_base = OTHER; note = uracil
  modified_base 298: mod_base = OTHER; note = uracil
  modified_base 9: mod_base = m5c
  modified_base 18: mod_base = m5c
  modified_base 23: mod_base = m5c
  modified_base 39: mod_base = m5c
  modified_base 51: mod_base = m5c
  modified_base 60: mod_base = m5c
  modified_base 63: mod_base = m5c
  modified_base 70: mod_base = m5c
  modified_base 79: mod_base = m5c
  modified_base 89: mod_base = m5c
  modified_base 91: mod_base = m5c
  modified_base 101: mod_base = m5c
  modified_base 116: mod_base = m5c
  modified_base 118: mod_base = m5c
  modified_base 125: mod_base = m5c
  modified_base 132: mod_base = m5c
  modified_base 159: mod_base = m5c
  modified_base 162: mod_base = m5c
  modified_base 186: mod_base = m5c
  modified_base 190: mod_base = m5c
  modified_base 193: mod_base = m5c
  modified_base 199: mod_base = m5c
  modified_base 202: mod_base = m5c
  modified_base 207: mod_base = m5c
  modified_base 226: mod_base = m5c
  modified_base 238: mod_base = m5c
  modified_base 241: mod_base = m5c
  modified_base 245: mod_base = m5c
  modified_base 263: mod_base = m5c
  modified_base 286: mod_base = m5c
  modified_base 293: mod_base = m5c
  modified_base 295: mod_base = m5c
  modified_base 299: mod_base = m5c
  variation 149: note = CpG site, residue is C if methylated or T(=U) if unmethylated
ggttttagcgttgatttcggttcggtttttgtttttttcgagtttatgttcgtaggtttcggcgtgggtcgtagttttcgggttgtgtcgcgttggttgtcgtttttttgggtttcgcgggtttcgttgttcggataggagttgttttygtttttattcgacgtgtttttattgaggtttttgggcgttcggcggtttcgtcgagtcgagggttttttattttttcgtttttttttacggcggtcgtttagtttttttttttcggagaggttttttttttttaggcgtttttcgcggtcg

SEQ ID NO: 275 - DNA, 300 bp, synthetic construct
  source 1..300: mol_type = other DNA
  modified_base 2: mod_base = OTHER; note = uracil
  modified_base 5: mod_base = OTHER; note = uracil
  modified_base 7: mod_base = OTHER; note = uracil
  modified_base 9: mod_base = OTHER; note = uracil
  modified_base 12..14: mod_base = OTHER; note = uracil
  modified_base 16..18: mod_base = OTHER; note = uracil
  modified_base 22: mod_base = OTHER; note = uracil
  modified_base 24..26: mod_base = OTHER; note = uracil
  modified_base 29: mod_base = OTHER; note = uracil
  modified_base 32..33: mod_base = OTHER; note = uracil
  modified_base 36..37: mod_base = OTHER; note = uracil
  modified_base 42..43: mod_base = OTHER; note = uracil
  modified_base 45..46: mod_base = OTHER; note = uracil
  modified_base 48: mod_base = OTHER; note = uracil
  modified_base 53: mod_base = OTHER; note = uracil
  modified_base 55..56: mod_base = OTHER; note = uracil
  modified_base 58: mod_base = OTHER; note = uracil
  modified_base 61..64: mod_base = OTHER; note = uracil
  modified_base 69..70: mod_base = OTHER; note = uracil
  modified_base 72..73: mod_base = OTHER; note = uracil
  modified_base 75..77: mod_base = OTHER; note = uracil
  modified_base 81..82: mod_base = OTHER; note = uracil
  modified_base 85: mod_base = OTHER; note = uracil
  modified_base 88: mod_base = OTHER; note = uracil
  modified_base 91: mod_base = OTHER; note = uracil
  modified_base 93..94: mod_base = OTHER; note = uracil
  modified_base 100: mod_base = OTHER; note = uracil
  modified_base 108..109: mod_base = OTHER; note = uracil
  modified_base 118: mod_base = OTHER; note = uracil
  modified_base 122..123: mod_base = OTHER; note = uracil
  modified_base 126..127: mod_base = OTHER; note = uracil
  modified_base 129: mod_base = OTHER; note = uracil
  modified_base 131: mod_base = OTHER; note = uracil
  modified_base 133..135: mod_base = OTHER; note = uracil
  modified_base 138: mod_base = OTHER; note = uracil
  modified_base 141: mod_base = OTHER; note = uracil
  modified_base 144: mod_base = OTHER; note = uracil
  modified_base 147: mod_base = OTHER; note = uracil
  modified_base 153..155: mod_base = OTHER; note = uracil
  modified_base 157: mod_base = OTHER; note = uracil
  modified_base 161..163: mod_base = OTHER; note = uracil
  modified_base 167: mod_base = OTHER; note = uracil
  modified_base 172..173: mod_base = OTHER; note = uracil
  modified_base 180: mod_base = OTHER; note = uracil
  modified_base 182: mod_base = OTHER; note = uracil
  modified_base 187: mod_base = OTHER; note = uracil
  modified_base 189..190: mod_base = OTHER; note = uracil
  modified_base 195: mod_base = OTHER; note = uracil
  modified_base 199: mod_base = OTHER; note = uracil
  modified_base 201..205: mod_base = OTHER; note = uracil
  modified_base 208: mod_base = OTHER; note = uracil
  modified_base 210: mod_base = OTHER; note = uracil
  modified_base 212: mod_base = OTHER; note = uracil
  modified_base 215..217: mod_base = OTHER; note = uracil
  modified_base 225..226: mod_base = OTHER; note = uracil
  modified_base 228: mod_base = OTHER; note = uracil
  modified_base 230: mod_base = OTHER; note = uracil
  modified_base 233..234: mod_base = OTHER; note = uracil
  modified_base 239: mod_base = OTHER; note = uracil
  modified_base 242..243: mod_base = OTHER; note = uracil
  modified_base 245: mod_base = OTHER; note = uracil
  modified_base 249..250: mod_base = OTHER; note = uracil
  modified_base 254: mod_base = OTHER; note = uracil
  modified_base 257: mod_base = OTHER; note = uracil
  modified_base 260: mod_base = OTHER; note = uracil
  modified_base 262: mod_base = OTHER; note = uracil
  modified_base 264..265: mod_base = OTHER; note = uracil
  modified_base 268..271: mod_base = OTHER; note = uracil
  modified_base 276..279: mod_base = OTHER; note = uracil
  modified_base 282..283: mod_base = OTHER; note = uracil
  modified_base 285..286: mod_base = OTHER; note = uracil
  modified_base 288..290: mod_base = OTHER; note = uracil
  modified_base 292..293: mod_base = OTHER; note = uracil
  modified_base 299: mod_base = OTHER; note = uracil
  modified_base 79: mod_base = m5c
  modified_base 191: mod_base = m5c
  modified_base 218: mod_base = m5c
  variation 150: note = CpG site, residue is C if methylated or T(=U) if unmethylated
gtattatatatttttttttgtttttttgttgttaattagttttattattgtgtatttttgttttaattttattttttacgtttgttgttgtattttggatttgtttttttgaaattgtatgttatttatttttttttttatttttgttgygttttttttgttttattaggatttgtggatttaggattttcgggtttttttttttatttttttttttcgttgggttttattattattttagttatttttttggtagttttatttttgttttaagattttagtttttatttttttggtttt

SEQ ID NO: 276 - DNA, 300 bp, synthetic construct
  source 1..300: mol_type = other DNA
  modified_base 5..6: mod_base = OTHER; note = uracil
  modified_base 20: mod_base = OTHER; note = uracil
  modified_base 27: mod_base = OTHER; note = uracil
  modified_base 34: mod_base = OTHER; note = uracil
  modified_base 45: mod_base = OTHER; note = uracil
  modified_base 48..49: mod_base = OTHER; note = uracil
  modified_base 60: mod_base = OTHER; note = uracil
  modified_base 77..79: mod_base = OTHER; note = uracil
  modified_base 107..108: mod_base = OTHER; note = uracil
  modified_base 116..117: mod_base = OTHER; note = uracil
  modified_base 123..124: mod_base = OTHER; note = uracil
  modified_base 126: mod_base = OTHER; note = uracil
  modified_base 131..132: mod_base = OTHER; note = uracil
  modified_base 141: mod_base = OTHER; note = uracil
  modified_base 152: mod_base = OTHER; note = uracil
  modified_base 155: mod_base = OTHER; note = uracil
  modified_base 180: mod_base = OTHER; note = uracil
  modified_base 184: mod_base = OTHER; note = uracil
  modified_base 190: mod_base = OTHER; note = uracil
  modified_base 198: mod_base = OTHER; note = uracil
  modified_base 203..204: mod_base = OTHER; note = uracil
  modified_base 211: mod_base = OTHER; note = uracil
  modified_base 214: mod_base = OTHER; note = uracil
  modified_base 217: mod_base = OTHER; note = uracil
  modified_base 241: mod_base = OTHER; note = uracil
  modified_base 249: mod_base = OTHER; note = uracil
  modified_base 251: mod_base = OTHER; note = uracil
  modified_base 262: mod_base = OTHER; note = uracil
  modified_base 270: mod_base = OTHER; note = uracil
  modified_base 273: mod_base = OTHER; note = uracil
  modified_base 281: mod_base = OTHER; note = uracil
  modified_base 300: mod_base = OTHER; note = uracil
  modified_base 82: mod_base = m5c
  modified_base 109: mod_base = m5c
  modified_base 221: mod_base = m5c
  variation 150: note = CpG site, residue is C if methylated or T(=U) if unmethylated
agaattaggagggtggaggttggggttttggggtaggagtgaagttgttaggaaagtggttgaaatggtagtgaggtttaacggggaagagagatgggggagaaagttcgggagttttgagtttataggttttgatagggtaagagggaygtagtagaagtagaagggagagtggatggtatgtaattttaggaaaataagtttaaggtgtagtagtaggcgtgggaggtggaattggggtagaggtgtatagtggtggaattggttggtagtagggagatagggagggatgtgtgatgt

SEQ ID NO: 277 - DNA, 300 bp, synthetic construct
  source 1..300: mol_type = other DNA
  modified_base 11: mod_base = OTHER; note = uracil
  modified_base 13: mod_base = OTHER; note = uracil
  modified_base 17..18: mod_base = OTHER; note = uracil
  modified_base 20..21: mod_base = OTHER; note = uracil
  modified_base 24: mod_base = OTHER; note = uracil
  modified_base 27: mod_base = OTHER; note = uracil
  modified_base 29: mod_base = OTHER; note = uracil
  modified_base 33..34: mod_base = OTHER; note = uracil
  modified_base 36: mod_base = OTHER; note = uracil
  modified_base 40: mod_base = OTHER; note = uracil
  modified_base 42: mod_base = OTHER; note = uracil
  modified_base 44: mod_base = OTHER; note = uracil
  modified_base 53..54: mod_base = OTHER; note = uracil
  modified_base 57: mod_base = OTHER; note = uracil
  modified_base 60: mod_base = OTHER; note = uracil
  modified_base 64..65: mod_base = OTHER; note = uracil
  modified_base 72: mod_base = OTHER; note = uracil
  modified_base 76: mod_base = OTHER; note = uracil
  modified_base 86: mod_base = OTHER; note = uracil
  modified_base 96: mod_base = OTHER; note = uracil
  modified_base 99: mod_base = OTHER; note = uracil
  modified_base 106..107: mod_base = OTHER; note = uracil
  modified_base 115..116: mod_base = OTHER; note = uracil
  modified_base 118: mod_base = OTHER; note = uracil
  modified_base 129..130: mod_base = OTHER; note = uracil
  modified_base 137: mod_base = OTHER; note = uracil
  modified_base 139..142: mod_base = OTHER; note = uracil
  modified_base 157: mod_base = OTHER; note = uracil
  modified_base 162: mod_base = OTHER; note = uracil
  modified_base 191: mod_base = OTHER; note = uracil
  modified_base 193: mod_base = OTHER; note = uracil
  modified_base 195: mod_base = OTHER; note = uracil
  modified_base 197: mod_base = OTHER; note = uracil
  modified_base 203: mod_base = OTHER; note = uracil
  modified_base 206: mod_base = OTHER; note = uracil
  modified_base 211: mod_base = OTHER; note = uracil
  modified_base 213..214: mod_base = OTHER; note = uracil
  modified_base 219: mod_base = OTHER; note = uracil
  modified_base 222: mod_base = OTHER; note = uracil
  modified_base 232: mod_base = OTHER; note = uracil
  modified_base 234: mod_base = OTHER; note = uracil
  modified_base 250: mod_base = OTHER; note = uracil
  modified_base 260: mod_base = OTHER; note = uracil
  modified_base 268: mod_base = OTHER; note = uracil
  modified_base 273: mod_base = OTHER; note = uracil
  modified_base 283..284: mod_base = OTHER; note = uracil
  modified_base 288: mod_base = OTHER; note = uracil
  modified_base 296: mod_base = OTHER; note = uracil
  modified_base 6: mod_base = m5c
  modified_base 73: mod_base = m5c
  modified_base 154: mod_base = m5c
  modified_base 207: mod_base = m5c
  modified_base 215: mod_base = m5c
  modified_base 297: mod_base = m5c
  variation 150: note = CpG site, residue is C if methylated or T(=U) if unmethylated
ggtggcgatgttttagttatttgtttttttgtttttttttatataaatgtattttgtttttttttagatgttcggtttaatgggattggatttatttttaaaagttttggtttgtttttgattgaaaattagtgtgttttttatggttayggacggttgtgtaggtttttgttttgttgaagggaattggtttattttgagttagtcgtgtattcgggttgttgatgtagttttagtgtgatggttaaattttaagtgttaatttgattgggttaaggaatgttagatattattttcggg

SEQ ID NO: 278 - DNA, 300 bp, synthetic construct
  source 1..300: mol_type = other DNA
  modified_base 1..2: mod_base = OTHER; note = uracil
  modified_base 15: mod_base = OTHER; note = uracil
  modified_base 19: mod_base = OTHER; note = uracil
  modified_base 23..24: mod_base = OTHER; note = uracil
  modified_base 29..31: mod_base = OTHER; note = uracil
  modified_base 35: mod_base = OTHER; note = uracil
  modified_base 43: mod_base = OTHER; note = uracil
  modified_base 45: mod_base = OTHER; note = uracil
  modified_base 57..58: mod_base = OTHER; note = uracil
  modified_base 61: mod_base = OTHER; note = uracil
  modified_base 63: mod_base = OTHER; note = uracil
  modified_base 65: mod_base = OTHER; note = uracil
  modified_base 71: mod_base = OTHER; note = uracil
  modified_base 74: mod_base = OTHER; note = uracil
  modified_base 77: mod_base = OTHER; note = uracil
  modified_base 80: mod_base = OTHER; note = uracil
  modified_base 83..84: mod_base = OTHER; note = uracil
  modified_base 91: mod_base = OTHER; note = uracil
  modified_base 96: mod_base = OTHER; note = uracil
  modified_base 100: mod_base = OTHER; note = uracil
  modified_base 102: mod_base = OTHER; note = uracil
  modified_base 111..112: mod_base = OTHER; note = uracil
  modified_base 117..119: mod_base = OTHER; note = uracil
  modified_base 122: mod_base = OTHER; note = uracil
  modified_base 125: mod_base = OTHER; note = uracil
  modified_base 130: mod_base = OTHER; note = uracil
  modified_base 136..137: mod_base = OTHER; note = uracil
  modified_base 140: mod_base = OTHER; note = uracil
  modified_base 142: mod_base = OTHER; note = uracil
  modified_base 145: mod_base = OTHER; note = uracil
  modified_base 149: mod_base = OTHER; note = uracil
  modified_base 155..156: mod_base = OTHER; note = uracil
  modified_base 165: mod_base = OTHER; note = uracil
  modified_base 167: mod_base = OTHER; note = uracil
  modified_base 169: mod_base = OTHER; note = uracil
  modified_base 177: mod_base = OTHER; note = uracil
  modified_base 181: mod_base = OTHER; note = uracil
  modified_base 187: mod_base = OTHER; note = uracil
  modified_base 191..192: mod_base = OTHER; note = uracil
  modified_base 197: mod_base = OTHER; note = uracil
  modified_base 212..213: mod_base = OTHER; note = uracil
  modified_base 217..219: mod_base = OTHER; note = uracil
  modified_base 226: mod_base = OTHER; note = uracil
  modified_base 231: mod_base = OTHER; note = uracil
  modified_base 234: mod_base = OTHER; note = uracil
  modified_base 245: mod_base = OTHER; note = uracil
  modified_base 252: mod_base = OTHER; note = uracil
  modified_base 270: mod_base = OTHER; note = uracil
  modified_base 278: mod_base = OTHER; note = uracil
  modified_base 285: mod_base = OTHER; note = uracil
  modified_base 291: mod_base = OTHER; note = uracil
  modified_base 296..297: mod_base = OTHER; note = uracil
  modified_base 299..300: mod_base = OTHER; note = uracil
  modified_base 3: mod_base = m5c
  modified_base 85: mod_base = m5c
  modified_base 93: mod_base = m5c
  modified_base 146: mod_base = m5c
  modified_base 227: mod_base = m5c
  modified_base 294: mod_base = m5c
  variation 150: note = CpG site, residue is C if methylated or T(=U) if unmethylated
ttcggaaataatgtttggtattttttagtttagttaaattgatatttaaagtttaattattatattgagattatattagtagttcgggtgtacggttgatttagagtgagttaattttttttaataaaataaaaatttgtatagtcgttygtaattatggggagtatattggtttttaattagaggtaaattaggatttttgaagataaatttagttttattaagtcggatatttggaaagaagtaggatatatttgtgtgaaagaggatagagaagtaggtggttagagtatcgttatt

SEQ ID NO: 279 - DNA, 300 bp, synthetic construct
  source 1..300: mol_type = other DNA
  modified_base 16: mod_base = OTHER; note = uracil
  modified_base 19..20: mod_base = OTHER; note = uracil
  modified_base 28: mod_base = OTHER; note = uracil
  modified_base 39..41: mod_base = OTHER; note = uracil
  modified_base 43: mod_base = OTHER; note = uracil
  modified_base 45..46: mod_base = OTHER; note = uracil
  modified_base 51..53: mod_base = OTHER; note = uracil
  modified_base 65..66: mod_base = OTHER; note = uracil
  modified_base 68..70: mod_base = OTHER; note = uracil
  modified_base 74..77: mod_base = OTHER; note = uracil
  modified_base 82..83: mod_base = OTHER; note = uracil
  modified_base 86: mod_base = OTHER; note = uracil
  modified_base 89: mod_base = OTHER; note = uracil
  modified_base 94: mod_base = OTHER; note = uracil
  modified_base 108: mod_base = OTHER; note = uracil
  modified_base 116: mod_base = OTHER; note = uracil
  modified_base 121..122: mod_base = OTHER; note = uracil
  modified_base 125: mod_base = OTHER; note = uracil
  modified_base 128..129: mod_base = OTHER; note = uracil
  modified_base 136: mod_base = OTHER; note = uracil
  modified_base 141: mod_base = OTHER; note = uracil
  modified_base 150: mod_base = OTHER; note = uracil
  modified_base 154: mod_base = OTHER; note = uracil
  modified_base 159: mod_base = OTHER; note = uracil
  modified_base 170: mod_base = OTHER; note = uracil
  modified_base 172..174: mod_base = OTHER; note = uracil
  modified_base 176..177: mod_base = OTHER; note = uracil
  modified_base 179: mod_base = OTHER; note = uracil
  modified_base 181: mod_base = OTHER; note = uracil
  modified_base 185: mod_base = OTHER; note = uracil
  modified_base 189: mod_base = OTHER; note = uracil
  modified_base 192..193: mod_base = OTHER; note = uracil
  modified_base 197: mod_base = OTHER; note = uracil
  modified_base 199..200: mod_base = OTHER; note = uracil
  modified_base 204..205: mod_base = OTHER; note = uracil
  modified_base 215: mod_base = OTHER; note = uracil
  modified_base 225: mod_base = OTHER; note = uracil
  modified_base 240..241: mod_base = OTHER; note = uracil
  modified_base 243: mod_base = OTHER; note = uracil
  modified_base 245..246: mod_base = OTHER; note = uracil
  modified_base 252: mod_base = OTHER; note = uracil
  modified_base 254: mod_base = OTHER; note = uracil
  modified_base 261: mod_base = OTHER; note = uracil
  modified_base 263: mod_base = OTHER; note = uracil
  modified_base 269: mod_base = OTHER; note = uracil
  modified_base 272..273: mod_base = OTHER; note = uracil
  modified_base 288: mod_base = OTHER; note = uracil
  modified_base 297..299: mod_base = OTHER; note = uracil
  modified_base 109: mod_base = m5c
  modified_base 155: mod_base = m5c
  modified_base 194: mod_base = m5c
  modified_base 202: mod_base = m5c
  modified_base 217: mod_base = m5c
  modified_base 235: mod_base = m5c
  variation 151: note = CpG site, residue is C if methylated or T(=U) if unmethylated
ggttttgggtgtggatattttggagggttgttttagtgtttatattaatgttttagttaaagaattattttgtttttttagttttttgtaggataggtgggaaagggtcgggtgtttggttttgttgttaggggatagtgtaggtgtgatygttcgggtagagatgagttattttttatattgttttgttgttcgtttttacgtttagttttagttcgtgtggttaagaaggggcgattttttatttagaatatatgggttataaatgttatttttgaaaatggaaataaaaataattta

SEQ ID NO: 280 - DNA, 300 bp, synthetic construct
  source 1..300: mol_type = other DNA
  modified_base 17..18: mod_base = OTHER; note = uracil
  modified_base 24: mod_base = OTHER; note = uracil
  modified_base 33: mod_base = OTHER; note = uracil
  modified_base 42..44: mod_base = OTHER; note = uracil
  modified_base 52: mod_base = OTHER; note = uracil
  modified_base 67..70: mod_base = OTHER; note = uracil
  modified_base 73: mod_base = OTHER; note = uracil
  modified_base 78..79: mod_base = OTHER; note = uracil
  modified_base 81: mod_base = OTHER; note = uracil
  modified_base 87: mod_base = OTHER; note = uracil
  modified_base 93: mod_base = OTHER; note = uracil
  modified_base 110: mod_base = OTHER; note = uracil
  modified_base 113: mod_base = OTHER; note = uracil
  modified_base 118: mod_base = OTHER; note = uracil
  modified_base 133: mod_base = OTHER; note = uracil
  modified_base 135: mod_base = OTHER; note = uracil
  modified_base 138: mod_base = OTHER; note = uracil
  modified_base 140: mod_base = OTHER; note = uracil
  modified_base 143..144: mod_base = OTHER; note = uracil
  modified_base 153: mod_base = OTHER; note = uracil
  modified_base 155: mod_base = OTHER; note = uracil
  modified_base 157..158: mod_base = OTHER; note = uracil
  modified_base 161: mod_base = OTHER; note = uracil
  modified_base 163: mod_base = OTHER; note = uracil
  modified_base 167..170: mod_base = OTHER; note = uracil
  modified_base 174: mod_base = OTHER; note = uracil
  modified_base 177: mod_base = OTHER; note = uracil
  modified_base 182..183: mod_base = OTHER; note = uracil
  modified_base 187: mod_base = OTHER; note = uracil
  modified_base 189..190: mod_base = OTHER; note = uracil
  modified_base 194..196: mod_base = OTHER; note = uracil
  modified_base 200..202: mod_base = OTHER; note = uracil
  modified_base 204..205: mod_base = OTHER; note = uracil
  modified_base 209..210: mod_base = OTHER; note = uracil
  modified_base 213: mod_base = OTHER; note = uracil
  modified_base 220: mod_base = OTHER; note = uracil
  modified_base 229: mod_base = OTHER; note = uracil
  modified_base 239: mod_base = OTHER; note = uracil
  modified_base 245: mod_base = OTHER; note = uracil
  modified_base 251: mod_base = OTHER; note = uracil
  modified_base 263: mod_base = OTHER; note = uracil
  modified_base 265: mod_base = OTHER; note = uracil
  modified_base 271: mod_base = OTHER; note = uracil
  modified_base 274..276: mod_base = OTHER; note = uracil
  modified_base 278..279: mod_base = OTHER; note = uracil
  modified_base 287..288: mod_base = OTHER; note = uracil
  modified_base 290: mod_base = OTHER; note = uracil
  modified_base 292..294: mod_base = OTHER; note = uracil
  modified_base 299..300: mod_base = OTHER; note = uracil
  modified_base 65: mod_base = m5c
  modified_base 83: mod_base = m5c
  modified_base 98: mod_base = m5c
  modified_base 106: mod_base = m5c
  modified_base 145: mod_base = m5c
  modified_base 191: mod_base = m5c
  variation 149: note = CpG site, residue is C if methylated or T(=U) if unmethylated
tgggttatttttgtttttatttttaaaggtagtatttgtgatttatgtgttttaggtgaggaatcgtttttttttgattatacgagttaaaattaggcgtggagacgggtagtaagatagtgtggagggtgatttatttttgttcggayggttatatttgtattgttttttggtagtaggattagatattcggtttttttttatttgttttgtagaaggttaaggggatagggtggttttttaattagggtattggtgtgggtattaaaatagttttttaggatgtttatatttaaaatt

SEQ ID NO: 281 - DNA, 300 bp, synthetic construct
  source 1..300: mol_type = other DNA
  modified_base 1: mod_base = OTHER; note = uracil
  modified_base 6..7: mod_base = OTHER; note = uracil
  modified_base 34: mod_base = OTHER; note = uracil
  modified_base 38..39: mod_base = OTHER; note = uracil
  modified_base 50: mod_base = OTHER; note = uracil
  modified_base 56: mod_base = OTHER; note = uracil
  modified_base 58: mod_base = OTHER; note = uracil
  modified_base 62..63: mod_base = OTHER; note = uracil
  modified_base 65..67: mod_base = OTHER; note = uracil
  modified_base 73..74: mod_base = OTHER; note = uracil
  modified_base 77..78: mod_base = OTHER; note = uracil
  modified_base 82..84: mod_base = OTHER; note = uracil
  modified_base 90..91: mod_base = OTHER; note = uracil
  modified_base 94..95: mod_base = OTHER; note = uracil
  modified_base 99: mod_base = OTHER; note = uracil
  modified_base 103..105: mod_base = OTHER; note = uracil
  modified_base 115: mod_base = OTHER; note = uracil
  modified_base 125: mod_base = OTHER; note = uracil
  modified_base 139: mod_base = OTHER; note = uracil
  modified_base 144..145: mod_base = OTHER; note = uracil
  modified_base 156..157: mod_base = OTHER; note = uracil
  modified_base 160: mod_base = OTHER; note = uracil
  modified_base 162: mod_base = OTHER; note = uracil
  modified_base 165..166: mod_base = OTHER; note = uracil
  modified_base 172: mod_base = OTHER; note = uracil
  modified_base 185: mod_base = OTHER; note = uracil
  modified_base 187: mod_base = OTHER; note = uracil
  modified_base 194: mod_base = OTHER; note = uracil
  modified_base 202: mod_base = OTHER; note = uracil
  modified_base 204: mod_base = OTHER; note = uracil
  modified_base 207..208: mod_base = OTHER; note = uracil
  modified_base 214: mod_base = OTHER; note = uracil
  modified_base 217..218: mod_base = OTHER; note = uracil
  modified_base 222: mod_base = OTHER; note = uracil
  modified_base 235: mod_base = OTHER; note = uracil
  modified_base 253..255: mod_base = OTHER; note = uracil
  modified_base 261: mod_base = OTHER; note = uracil
  modified_base 263: mod_base = OTHER; note = uracil
  modified_base 268..271: mod_base = OTHER; note = uracil
  modified_base 276: mod_base = OTHER; note = uracil
  modified_base 279: mod_base = OTHER; note = uracil
  modified_base 289: mod_base = OTHER; note = uracil
  modified_base 293: mod_base = OTHER; note = uracil
  modified_base 12: mod_base = m5c
  modified_base 23: mod_base = m5c
  modified_base 96: mod_base = m5c
  modified_base 107: mod_base = m5c
  modified_base 109: mod_base = m5c
  modified_base 146: mod_base = m5c
  modified_base 188: mod_base = m5c
  modified_base 197: mod_base = m5c
  variation 151: note = CpG site, residue is C if methylated or T(=U) if unmethylated
tagaatttgagcgatgaagtgacgggatttagttaggtttatgaagagttaatggtatttgttttttataatttttttagttttattggttaattcgtttgtttttcgcgtgatttttttggatttgaagtggtgttttaggattcggagygtggtttgtattgttttgttttgtttgtttgtgtatcggatttatcgtgatttattttgagttatttaggtagtatggaagaattttggagttattttaaattttttggtttagaattttattttttttagaattaatatgtaagataa

SEQ ID NO: 282 - DNA, 300 bp, synthetic construct
  source 1..300: mol_type = other DNA
  modified_base 5: mod_base = OTHER; note = uracil
  modified_base 9: mod_base = OTHER; note = uracil
  modified_base 19: mod_base = OTHER; note = uracil
  modified_base 36: mod_base = OTHER; note = uracil
  modified_base 41..42: mod_base = OTHER; note = uracil
  modified_base 59: mod_base = OTHER; note = uracil
  modified_base 61..62: mod_base = OTHER; note = uracil
  modified_base 69: mod_base = OTHER; note = uracil
  modified_base 72..73: mod_base = OTHER; note = uracil
  modified_base 77: mod_base = OTHER; note = uracil
  modified_base 80..81: mod_base = OTHER; note = uracil
  modified_base 89: mod_base = OTHER; note = uracil
  modified_base 91: mod_base = OTHER; note = uracil
  modified_base 101: mod_base = OTHER; note = uracil
  modified_base 111: mod_base = OTHER; note = uracil
  modified_base 117: mod_base = OTHER; note = uracil
  modified_base 119: mod_base = OTHER; note = uracil
  modified_base 123: mod_base = OTHER; note = uracil
  modified_base 127: mod_base = OTHER; note = uracil
  modified_base 132: mod_base = OTHER; note = uracil
  modified_base 137: mod_base = OTHER; note = uracil
  modified_base 142: mod_base = OTHER; note = uracil
  modified_base 146..147: mod_base = OTHER; note = uracil
  modified_base 151: mod_base = OTHER; note = uracil
  modified_base 153: mod_base = OTHER; note = uracil
  modified_base 159..160: mod_base = OTHER; note = uracil
  modified_base 166: mod_base = OTHER; note = uracil
  modified_base 168..169: mod_base = OTHER; note = uracil
  modified_base 171: mod_base = OTHER; note = uracil
  modified_base 174: mod_base = OTHER; note = uracil
  modified_base 179..180: mod_base = OTHER; note = uracil
  modified_base 189: mod_base = OTHER; note = uracil
  modified_base 200: mod_base = OTHER; note = uracil
  modified_base 212..213: mod_base = OTHER; note = uracil
  modified_base 221: mod_base = OTHER; note = uracil
  modified_base 240: mod_base = OTHER; note = uracil
  modified_base 246..247: mod_base = OTHER; note = uracil
  modified_base 253: mod_base = OTHER; note = uracil
  modified_base 255: mod_base = OTHER; note = uracil
  modified_base 258: mod_base = OTHER; note = uracil
  modified_base 264..265: mod_base = OTHER; note = uracil
  modified_base 269: mod_base = OTHER; note = uracil
  modified_base 275..276: mod_base = OTHER; note = uracil
  modified_base 280: mod_base = OTHER; note = uracil
  modified_base 282: mod_base = OTHER; note = uracil
  modified_base 285: mod_base = OTHER; note = uracil
  modified_base 290: mod_base = OTHER; note = uracil
  modified_base 292: mod_base = OTHER; note = uracil
  modified_base 298: mod_base = OTHER; note = uracil
  modified_base 103: mod_base = m5c
  modified_base 112: mod_base = m5c
  modified_base 154: mod_base = m5c
  modified_base 191: mod_base = m5c
  modified_base 193: mod_base = m5c
  modified_base 204: mod_base = m5c
  modified_base 277: mod_base = m5c
  modified_base 288: mod_base = m5c
  variation 149: note = CpG site, residue is C if methylated or T(=U) if unmethylated
ttattttgtatgttaattttagaagaaatggggttttgagttaaagggtttaaaataattttaaagtttttttatattgtttggatgatttaggatgagttacgatgaattcggtgtataaataaatagaataaggtagtgtaggttaygtttcgggttttgaaatattattttagatttaaaaagattacgcgagggatagacgggttggttaatgggattggaaggattatgggaggtaagtgttattgattttttataggtttgattaaatttcgttattttatcgtttaggttttg

SEQ ID NO: 283 - DNA, 300 bp, synthetic construct
  source 1..300: mol_type = other DNA
  modified_base 3..5: mod_base = OTHER; note = uracil
  modified_base 10: mod_base = OTHER; note = uracil
  modified_base 12..13: mod_base = OTHER; note = uracil
  modified_base 18: mod_base = OTHER; note = uracil
  modified_base 21: mod_base = OTHER; note = uracil
  modified_base 23..25: mod_base = OTHER; note = uracil
  modified_base 27..29: mod_base = OTHER; note = uracil
  modified_base 31..32: mod_base = OTHER; note = uracil
  modified_base 34: mod_base = OTHER; note = uracil
  modified_base 36..38: mod_base = OTHER; note = uracil
  modified_base 42..44: mod_base = OTHER; note = uracil
  modified_base 47: mod_base = OTHER; note = uracil
  modified_base 49..50: mod_base = OTHER; note = uracil
  modified_base 55..56: mod_base = OTHER; note = uracil
  modified_base 58: mod_base = OTHER; note = uracil
  modified_base 66: mod_base = OTHER; note = uracil
  modified_base 69..70: mod_base = OTHER; note = uracil
  modified_base 73..74: mod_base = OTHER; note = uracil
  modified_base 84: mod_base = OTHER; note = uracil
  modified_base 86: mod_base = OTHER; note = uracil
  modified_base 91..93: mod_base = OTHER; note = uracil
  modified_base 95: mod_base = OTHER; note = uracil
  modified_base 98: mod_base = OTHER; note = uracil
  modified_base 100: mod_base = OTHER; note = uracil
  modified_base 103: mod_base = OTHER; note = uracil
  modified_base 105..107: mod_base = OTHER; note = uracil
  modified_base 109: mod_base = OTHER; note = uracil
  modified_base 114..115: mod_base = OTHER; note = uracil
  modified_base 117: mod_base = OTHER; note = uracil
  modified_base 120: mod_base = OTHER; note = uracil
  modified_base 125: mod_base = OTHER; note = uracil
  modified_base 127: mod_base = OTHER; note = uracil
  modified_base 130: mod_base = OTHER; note = uracil
  modified_base 133: mod_base = OTHER; note = uracil
  modified_base 136: mod_base = OTHER; note = uracil
  modified_base 145: mod_base = OTHER; note = uracil
  modified_base 147: mod_base = OTHER; note = uracil
  modified_base 152..154: mod_base = OTHER; note = uracil
  modified_base 156: mod_base = OTHER; note = uracil
  modified_base 159: mod_base = OTHER; note = uracil
  modified_base 164: mod_base = OTHER; note = uracil
  modified_base 166..168: mod_base = OTHER; note = uracil
  modified_base 170: mod_base = OTHER; note = uracil
  modified_base 175..176: mod_base = OTHER; note = uracil
  modified_base 178: mod_base = OTHER; note = uracil
  modified_base 181: mod_base = OTHER; note = uracil
  modified_base 186: mod_base = OTHER; note = uracil
  modified_base 188: mod_base = OTHER; note = uracil
  modified_base 191: mod_base = OTHER; note = uracil
  modified_base 194: mod_base = OTHER; note = uracil
  modified_base 197: mod_base = OTHER; note = uracil
  modified_base 206: mod_base = OTHER; note = uracil
  modified_base 208: mod_base = OTHER; note = uracil
  modified_base 213: mod_base = OTHER; note = uracil
  modified_base 215: mod_base = OTHER; note = uracil
  modified_base 217: mod_base = OTHER; note = uracil
  modified_base 220: mod_base = OTHER; note = uracil
  modified_base 222: mod_base = OTHER; note = uracil
  modified_base 225: mod_base = OTHER; note = uracil
  modified_base 227..229: mod_base = OTHER; note = uracil
  modified_base 231: mod_base = OTHER; note = uracil
  modified_base 236..237: mod_base = OTHER; note = uracil
  modified_base 242: mod_base = OTHER; note = uracil
  modified_base 247: mod_base = OTHER; note = uracil
  modified_base 249: mod_base = OTHER; note = uracil
  modified_base 252: mod_base = OTHER; note = uracil
  modified_base 255: mod_base = OTHER; note = uracil
  modified_base 258: mod_base = OTHER; note = uracil
  modified_base 273: mod_base = OTHER; note = uracil
  modified_base 277: mod_base = OTHER; note = uracil
  modified_base 279..280: mod_base = OTHER; note = uracil
  modified_base 282: mod_base = OTHER; note = uracil
  modified_base 290: mod_base = OTHER; note = uracil
  modified_base 89: mod_base = m5c
  modified_base 137: mod_base = m5c
  modified_base 198: mod_base = m5c
  modified_base 211: mod_base = m5c
  modified_base 239: mod_base = m5c
  variation 150: note = CpG site, residue is C if methylated or T(=U) if unmethylated
gttttttggtattaggatattatttttttattttttttagatttttttttttgatttttttagagtagttatttttggagttgtttaacgttttttttttttttttttttgaattatagtttggtttatttattttcgggttagtttaaygttttttttttttttttttttgaattatagtttggtttatttattttcgggttagtttaacgtattttttttttttttttttgaattacggtttggtttatttatttttgggttaatttaggttttttttatagatagtttgaaaaggga

SEQ ID NO: 284 - DNA, 300 bp, synthetic construct
  source 1..300: mol_type = other DNA
  modified_base 2..4: mod_base = OTHER; note = uracil
  modified_base 9: mod_base = OTHER; note = uracil
  modified_base 13: mod_base = OTHER; note = uracil
  modified_base 17: mod_base = OTHER; note = uracil
  modified_base 29..30: mod_base = OTHER; note = uracil
  modified_base 39..41: mod_base = OTHER; note = uracil
  modified_base 55..56: mod_base = OTHER; note = uracil
  modified_base 60: mod_base = OTHER; note = uracil
  modified_base 68: mod_base = OTHER; note = uracil
  modified_base 96: mod_base = OTHER; note = uracil
  modified_base 100..101: mod_base = OTHER; note = uracil
  modified_base 116..117: mod_base = OTHER; note = uracil
  modified_base 121: mod_base = OTHER; note = uracil
  modified_base 129: mod_base = OTHER; note = uracil
  modified_base 157: mod_base = OTHER; note = uracil
  modified_base 161..162: mod_base = OTHER; note = uracil
  modified_base 177..178: mod_base = OTHER; note = uracil
  modified_base 182: mod_base = OTHER; note = uracil
  modified_base 190: mod_base = OTHER; note = uracil
  modified_base 218: mod_base = OTHER; note = uracil
  modified_base 221: mod_base = OTHER; note = uracil
  modified_base 223..224: mod_base = OTHER; note = uracil
  modified_base 233: mod_base = OTHER; note = uracil
  modified_base 236: mod_base = OTHER; note = uracil
  modified_base 238: mod_base = OTHER; note = uracil
  modified_base 248: mod_base = OTHER; note = uracil
  modified_base 261: mod_base = OTHER; note = uracil
  modified_base 285..286: mod_base = OTHER; note = uracil
  modified_base 292..293: mod_base = OTHER; note = uracil
  modified_base 300: mod_base = OTHER; note = uracil
  modified_base 61: mod_base = m5c
  modified_base 89: mod_base = m5c
  modified_base 102: mod_base = m5c
  modified_base 163: mod_base = m5c
  modified_base 211: mod_base = m5c
  variation 150: note = CpG site, residue is C if methylated or T(=U) if unmethylated
tttttttttagattatttgtggagaaagtttaaattaatttagaagtagatgagttaagtcgtggtttagagggagaagagaagagtgcgttgagttaattcggaagtagatgagttaagttgtggtttagagggagaaaagaagagggygttgagttaattcggaagtagatgagttaagttgtggtttagagggagaagagaagagggcgttgagtaattttaaggatggttgttttaaagaggttaaggagaagggtttgggagaggtgggagggtgatgttttggtgttaagggat

SEQ ID NO: 285 - DNA, 300 bp, synthetic construct
  source 1..300: mol_type = other DNA
  modified_base 1: mod_base = OTHER; note = uracil
  modified_base 7: mod_base = OTHER; note = uracil
  modified_base 10: mod_base = OTHER; note = uracil
  modified_base 15: mod_base = OTHER; note = uracil
  modified_base 19: mod_base = OTHER; note = uracil
  modified_base 24: mod_base = OTHER; note = uracil
  modified_base 31: mod_base = OTHER; note = uracil
  modified_base 38: mod_base = OTHER; note = uracil
  modified_base 42..43: mod_base = OTHER; note = uracil
  modified_base 47: mod_base = OTHER; note = uracil
  modified_base 69..70: mod_base = OTHER; note = uracil
  modified_base 73..74: mod_base = OTHER; note = uracil
  modified_base 81..83: mod_base = OTHER; note = uracil
  modified_base 85: mod_base = OTHER; note = uracil
  modified_base 91: mod_base = OTHER; note = uracil
  modified_base 97..98: mod_base = OTHER; note = uracil
  modified_base 110: mod_base = OTHER; note = uracil
  modified_base 116..118: mod_base = OTHER; note = uracil
  modified_base 127: mod_base = OTHER; note = uracil
  modified_base 133..134: mod_base = OTHER; note = uracil
  modified_base 137: mod_base = OTHER; note = uracil
  modified_base 150: mod_base = OTHER; note = uracil
  modified_base 153..154: mod_base = OTHER; note = uracil
  modified_base 167: mod_base = OTHER; note = uracil
  modified_base 184: mod_base = OTHER; note = uracil
  modified_base 190: mod_base = OTHER; note = uracil
  modified_base 209..211: mod_base = OTHER; note = uracil
  modified_base 219: mod_base = OTHER; note = uracil
  modified_base 221: mod_base = OTHER; note = uracil
  modified_base 229: mod_base = OTHER; note = uracil
  modified_base 233: mod_base = OTHER; note = uracil
  modified_base 243: mod_base = OTHER; note = uracil
  modified_base 245: mod_base = OTHER; note = uracil
  modified_base 251: mod_base = OTHER; note = uracil
  modified_base 255: mod_base = OTHER; note = uracil
  modified_base 265: mod_base = OTHER; note = uracil
  modified_base 295: mod_base = OTHER; note = uracil
  modified_base 44: mod_base = m5c
  modified_base 93: mod_base = m5c
  modified_base 104: mod_base = m5c
  modified_base 111: mod_base = m5c
  modified_base 130: mod_base = m5c
  modified_base 138: mod_base = m5c
  modified_base 217: mod_base = m5c
  variation 151: note = CpG site, residue is C if methylated or T(=U) if unmethylated
ttgagttaataaggttgataaggttgtgttttggatgtaggttcggtagatgtttgagggggaggtggttagtttggaggtttttaggagtacgggtttggtgcgggtgtcgaggtttatgaaggttatcgatttgtcgggaggtggggtygtttttgtgatggagtatttgaagatgaagagtttgagtaggtgagtgtgtgtgagatttatatgcgtatatgtgtataggtagagagagatttagagataaatagagagagatagagaaagggatagagatggggagggagatagaaa

SEQ ID NO: 286 - DNA, 300 bp, synthetic construct
  source 1..300: mol_type = other DNA
  modified_base 4: mod_base = OTHER; note = uracil
  modified_base 8: mod_base = OTHER; note = uracil
  modified_base 10..12: mod_base = OTHER; note = uracil
  modified_base 14..17: mod_base = OTHER; note = uracil
  modified_base 20: mod_base = OTHER; note = uracil
  modified_base 22: mod_base = OTHER; note = uracil
  modified_base 26..28: mod_base = OTHER; note = uracil
  modified_base 32: mod_base = OTHER; note = uracil
  modified_base 34: mod_base = OTHER; note = uracil
  modified_base 38: mod_base = OTHER; note = uracil
  modified_base 40: mod_base = OTHER; note = uracil
  modified_base 42: mod_base = OTHER; note = uracil
  modified_base 44: mod_base = OTHER; note = uracil
  modified_base 52: mod_base = OTHER; note = uracil
  modified_base 54: mod_base = OTHER; note = uracil
  modified_base 60: mod_base = OTHER; note = uracil
  modified_base 62: mod_base = OTHER; note = uracil
  modified_base 64: mod_base = OTHER; note = uracil
  modified_base 66: mod_base = OTHER; note = uracil
  modified_base 69..70: mod_base = OTHER; note = uracil
  modified_base 75: mod_base = OTHER; note = uracil
  modified_base 77: mod_base = OTHER; note = uracil
  modified_base 85: mod_base = OTHER; note = uracil
  modified_base 94: mod_base = OTHER; note = uracil
  modified_base 96: mod_base = OTHER; note = uracil
  modified_base 98: mod_base = OTHER; note = uracil
  modified_base 100: mod_base = OTHER; note = uracil
  modified_base 102: mod_base = OTHER; note = uracil
  modified_base 104: mod_base = OTHER; note = uracil
  modified_base 106: mod_base = OTHER; note = uracil
  modified_base 108..109: mod_base = OTHER; note = uracil
  modified_base 112: mod_base = OTHER; note = uracil
  modified_base 114: mod_base = OTHER; note = uracil
  modified_base 118: mod_base = OTHER; note = uracil
  modified_base 120: mod_base = OTHER; note = uracil
  modified_base 123: mod_base = OTHER; note = uracil
  modified_base 126: mod_base = OTHER; note = uracil
  modified_base 129: mod_base = OTHER; note = uracil
  modified_base 135: mod_base = OTHER; note = uracil
  modified_base 137..138: mod_base = OTHER; note = uracil
  modified_base 141: mod_base = OTHER; note = uracil
  modified_base 143: mod_base = OTHER; note = uracil
  modified_base 152..155: mod_base = OTHER; note = uracil
  modified_base 157..158: mod_base = OTHER; note = uracil
  modified_base 160..161: mod_base = OTHER; note = uracil
  modified_base 165: mod_base = OTHER; note = uracil
  modified_base 176..177: mod_base = OTHER; note = uracil
  modified_base 180: mod_base = OTHER; note = uracil
  modified_base 186..187: mod_base = OTHER; note = uracil
  modified_base 192: mod_base = OTHER; note = uracil
  modified_base 194..195: mod_base = OTHER; note = uracil
  modified_base 198: mod_base = OTHER; note = uracil
  modified_base 200..201: mod_base = OTHER; note = uracil
  modified_base 205..206: mod_base = OTHER; note = uracil
  modified_base 211: mod_base = OTHER; note = uracil
  modified_base 213..214: mod_base = OTHER; note = uracil
  modified_base 221..222: mod_base = OTHER; note = uracil
  modified_base 224..225: mod_base = OTHER; note = uracil
  modified_base 229: mod_base = OTHER; note = uracil
  modified_base 233..234: mod_base = OTHER; note = uracil
  modified_base 236..237: mod_base = OTHER; note = uracil
  modified_base 239..243: mod_base = OTHER; note = uracil
  modified_base 245: mod_base = OTHER; note = uracil
  modified_base 249: mod_base = OTHER; note = uracil
  modified_base 252: mod_base = OTHER; note = uracil
  modified_base 255: mod_base = OTHER; note = uracil
  modified_base 260..261: mod_base = OTHER; note = uracil
  modified_base 264: mod_base = OTHER; note = uracil
  modified_base 267..268: mod_base = OTHER; note = uracil
  modified_base 273: mod_base = OTHER; note = uracil
  modified_base 275: mod_base = OTHER; note = uracil
  modified_base 278..279: mod_base = OTHER; note = uracil
  modified_base 284: mod_base = OTHER; note = uracil
  modified_base 287..288: mod_base = OTHER; note = uracil
  modified_base 296: mod_base = OTHER; note = uracil
  modified_base 298: mod_base = OTHER; note = uracil
  modified_base 83: mod_base = m5c
  modified_base 162: mod_base = m5c
  modified_base 170: mod_base = m5c
  modified_base 189: mod_base = m5c
  modified_base 196: mod_base = m5c
  modified_base 207: mod_base = m5c
  modified_base 256: mod_base = m5c
  variation 149: note = CpG site, residue is C if methylated or T(=U) if unmethylated
tttttgtttttttttttatttttatttttttttttgtttttttttgtttgtttttgagtttttttttgtttgtatatatgtgcgtatatgggttttatatatatttatttgtttaagttttttatttttaaatgttttattataaaggyggttttatttttcggtaggtcgatgatttttatgggtttcggtattcgtattaggttcgtgtttttgagggtttttaggttggttattttttttttaaatatttgtcgggtttgtatttagaatatagttttgttagttttgttgatttag

SEQ ID NO: 287 - DNA, 300 bp, synthetic construct
  source 1..300: mol_type = other DNA
  modified_base 7: mod_base = OTHER; note = uracil
  modified_base 9: mod_base = OTHER; note = uracil
  modified_base 11: mod_base = OTHER; note = uracil
  modified_base 17: mod_base = OTHER; note = uracil
  modified_base 26: mod_base = OTHER; note = uracil
  modified_base 29: mod_base = OTHER; note = uracil
  modified_base 32: mod_base = OTHER; note = uracil
  modified_base 44..45: mod_base = OTHER; note = uracil
  modified_base 48: mod_base = OTHER; note = uracil
  modified_base 50..52: mod_base = OTHER; note = uracil
  modified_base 57: mod_base = OTHER; note = uracil
  modified_base 64..66: mod_base = OTHER; note = uracil
  modified_base 68..69: mod_base = OTHER; note = uracil
  modified_base 71..72: mod_base = OTHER; note = uracil
  modified_base 83..84: mod_base = OTHER; note = uracil
  modified_base 88: mod_base = OTHER; note = uracil
  modified_base 91..92: mod_base = OTHER; note = uracil
  modified_base 96..97: mod_base = OTHER; note = uracil
  modified_base 100: mod_base = OTHER; note = uracil
  modified_base 105..106: mod_base = OTHER; note = uracil
  modified_base 108..109: mod_base = OTHER; note = uracil
  modified_base 112: mod_base = OTHER; note = uracil
  modified_base 123: mod_base = OTHER; note = uracil
  modified_base 130..131: mod_base = OTHER; note = uracil
  modified_base 134..135: mod_base = OTHER; note = uracil
  modified_base 138..139: mod_base = OTHER; note = uracil
  modified_base 160: mod_base = OTHER; note = uracil
  modified_base 162..164: mod_base = OTHER; note = uracil
  modified_base 168: mod_base = OTHER; note = uracil
  modified_base 172..173: mod_base = OTHER; note = uracil
  modified_base 175: mod_base = OTHER; note = uracil
  modified_base 179..180: mod_base = OTHER; note = uracil
  modified_base 185: mod_base = OTHER; note = uracil
  modified_base 189: mod_base = OTHER; note = uracil
  modified_base 192..194: mod_base = OTHER; note = uracil
  modified_base 196..197: mod_base = OTHER; note = uracil
  modified_base 204: mod_base = OTHER; note = uracil
  modified_base 221: mod_base = OTHER; note = uracil
  modified_base 233: mod_base = OTHER; note = uracil
  modified_base 241..242: mod_base = OTHER; note = uracil
  modified_base 251: mod_base = OTHER; note = uracil
  modified_base 255: mod_base = OTHER; note = uracil
  modified_base 257: mod_base = OTHER; note = uracil
  modified_base 260: mod_base = OTHER; note = uracil
  modified_base 268: mod_base = OTHER; note = uracil
  modified_base 273: mod_base = OTHER; note = uracil
  modified_base 282: mod_base = OTHER; note = uracil
  modified_base 285..288: mod_base = OTHER; note = uracil
  modified_base 291: mod_base = OTHER; note = uracil
  modified_base 293: mod_base = OTHER; note = uracil
  modified_base 295..297: mod_base = OTHER; note = uracil
  modified_base 300: mod_base = OTHER; note = uracil
  modified_base 3: mod_base = m5c
  modified_base 14: mod_base = m5c
  modified_base 18: mod_base = m5c
  modified_base 20: mod_base = m5c
  modified_base 23: mod_base = m5c
  modified_base 33: mod_base = m5c
  modified_base 35: mod_base = m5c
  modified_base 38: mod_base = m5c
  modified_base 41: mod_base = m5c
  modified_base 53: mod_base = m5c
  modified_base 60: mod_base = m5c
  modified_base 73: mod_base = m5c
  modified_base 75: mod_base = m5c
  modified_base 93: mod_base = m5c
  modified_base 101: mod_base = m5c
  modified_base 119: mod_base = m5c
  modified_base 141: mod_base = m5c
  modified_base 143: mod_base = m5c
  modified_base 147: mod_base = m5c
  modified_base 152: mod_base = m5c
  modified_base 156: mod_base = m5c
  modified_base 158: mod_base = m5c
  modified_base 165: mod_base = m5c
  modified_base 182: mod_base = m5c
  modified_base 186: mod_base = m5c
  modified_base 201: mod_base = m5c
  modified_base 207: mod_base = m5c
  modified_base 213: mod_base = m5c
  modified_base 216: mod_base = m5c
  modified_base 218: mod_base = m5c
  modified_base 225: mod_base = m5c
  modified_base 228: mod_base = m5c
  modified_base 234: mod_base = m5c
  modified_base 236: mod_base = m5c
  modified_base 246: mod_base = m5c
  modified_base 249: mod_base = m5c
  modified_base 261: mod_base = m5c
  modified_base 263: mod_base = m5c
  modified_base 266: mod_base = m5c
  modified_base 270: mod_base = m5c
  modified_base 275: mod_base = m5c
  modified_base 278: mod_base = m5c
  modified_base 280: mod_base = m5c
  variation 150: note = CpG site, residue is C if methylated or T(=U) if unmethylated
ttcgtgtattttgcggtcgcggcggtagtagtcgcggcggcggttagtttttcggtttacgtgtttattattcgcgtgggttttatgttgttcggtttatcgtattatttgtaggggtcgggtagtgggttagttaattacgcgggcggygcgggcgcgtatttcggttggttttaggtttcggtcgatagttttttatacggtagcggaggcggcgcggttggcggcggggtcgcggggtttggcggcgttggtttagtcgcggcgtacgtttcggcgcgttttttttatttttttagt

SEQ ID NO: 288 - DNA, 300 bp, synthetic construct
  source 1..300: mol_type = other DNA
  modified_base 2: mod_base = OTHER; note = uracil
  modified_base 24: mod_base = OTHER; note = uracil
  modified_base 36: mod_base = OTHER; note = uracil
  modified_base 42: mod_base = OTHER; note = uracil
  modified_base 47..48: mod_base = OTHER; note = uracil
  modified_base 53: mod_base = OTHER; note = uracil
  modified_base 56..57: mod_base = OTHER; note = uracil
  modified_base 61..63: mod_base = OTHER; note = uracil
  modified_base 69..71: mod_base = OTHER; note = uracil
  modified_base 74: mod_base = OTHER; note = uracil
  modified_base 77..78: mod_base = OTHER; note = uracil
  modified_base 81: mod_base = OTHER; note = uracil
  modified_base 86: mod_base = OTHER; note = uracil
  modified_base 89..90: mod_base = OTHER; note = uracil
  modified_base 92: mod_base = OTHER; note = uracil
  modified_base 95: mod_base = OTHER; note = uracil
  modified_base 98: mod_base = OTHER; note = uracil
  modified_base 110: mod_base = OTHER; note = uracil
  modified_base 117: mod_base = OTHER; note = uracil
  modified_base 123..124: mod_base = OTHER; note = uracil
  modified_base 130..131: mod_base = OTHER; note = uracil
  modified_base 134: mod_base = OTHER; note = uracil
  modified_base 146..147: mod_base = OTHER; note = uracil
  modified_base 152: mod_base = OTHER; note = uracil
  modified_base 155..156: mod_base = OTHER; note = uracil
  modified_base 168: mod_base = OTHER; note = uracil
  modified_base 172..174: mod_base = OTHER; note = uracil
  modified_base 176: mod_base = OTHER; note = uracil
  modified_base 179..180: mod_base = OTHER; note = uracil
  modified_base 184..187: mod_base = OTHER; note = uracil
  modified_base 190: mod_base = OTHER; note = uracil
  modified_base 206: mod_base = OTHER; note = uracil
  modified_base 211: mod_base = OTHER; note = uracil
  modified_base 214: mod_base = OTHER; note = uracil
  modified_base 221..223: mod_base = OTHER; note = uracil
  modified_base 238: mod_base = OTHER; note = uracil
  modified_base 246: mod_base = OTHER; note = uracil
  modified_base 254: mod_base = OTHER; note = uracil
  modified_base 258: mod_base = OTHER; note = uracil
  modified_base 261: mod_base = OTHER; note = uracil
  modified_base 264: mod_base = OTHER; note = uracil
  modified_base 270: mod_base = OTHER; note = uracil
  modified_base 273: mod_base = OTHER; note = uracil
  modified_base 276: mod_base = OTHER; note = uracil
  modified_base 279: mod_base = OTHER; note = uracil
  modified_base 285: mod_base = OTHER; note = uracil
  modified_base 288: mod_base = OTHER; note = uracil
  modified_base 295: mod_base = OTHER; note = uracil
  modified_base 20: mod_base = m5c
  modified_base 22: mod_base = m5c
  modified_base 25: mod_base = m5c
  modified_base 30: mod_base = m5c
  modified_base 34: mod_base = m5c
  modified_base 37: mod_base = m5c
  modified_base 39: mod_base = m5c
  modified_base 51: mod_base = m5c
  modified_base 54: mod_base = m5c
  modified_base 64: mod_base = m5c
  modified_base 66: mod_base = m5c
  modified_base 72: mod_base = m5c
  modified_base 75: mod_base = m5c
  modified_base 82: mod_base = m5c
  modified_base 84: mod_base = m5c
  modified_base 87: mod_base = m5c
  modified_base 93: mod_base = m5c
  modified_base 99: mod_base = m5c
  modified_base 114: mod_base = m5c
  modified_base 118: mod_base = m5c
  modified_base 135: mod_base = m5c
  modified_base 142: mod_base = m5c
  modified_base 144: mod_base = m5c
  modified_base 148: mod_base = m5c
  modified_base 153: mod_base = m5c
  modified_base 157: mod_base = m5c
  modified_base 159: mod_base = m5c
  modified_base 181: mod_base = m5c
  modified_base 199: mod_base = m5c
  modified_base 207: mod_base = m5c
  modified_base 225: mod_base = m5c
  modified_base 227: mod_base = m5c
  modified_base 240: mod_base = m5c
  modified_base 247: mod_base = m5c
  modified_base 259: mod_base = m5c
  modified_base 262: mod_base = m5c
  modified_base 265: mod_base = m5c
  modified_base 267: mod_base = m5c
  modified_base 277: mod_base = m5c
  modified_base 280: mod_base = m5c
  modified_base 282: mod_base = m5c
  modified_base 286: mod_base = m5c
  modified_base 297: mod_base = m5c
  variation 150: note = CpG site, residue is C if methylated or T(=U) if unmethylated
gttgggagagtaggggaagcgcgtcgagacgtgcgtcgcggttgagttagcgtcgttaggtttcgcggtttcgtcgttagtcgcgtcgttttcgttgtcgtatggagggttgtcggtcgaggtttgaggttagtcggggtgcgcgttcgygtcgttcgcgtggttggttggtttattgttcgatttttgtaggtggtacggtaggtcgggtagtatggaatttacgcgggtggtgggtacgtagatcggggagttggtcgtcgtcgcggttgttgtcgtcgcggtcgtagagtgtacgaa

SEQ ID NO: 289 - DNA, 300 bp, synthetic construct
  source 1..300: mol_type = other DNA
  modified_base 2: mod_base = OTHER; note = uracil
  modified_base 14: mod_base = OTHER; note = uracil
  modified_base 19: mod_base = OTHER; note = uracil
  modified_base 26..27: mod_base = OTHER; note = uracil
  modified_base 30: mod_base = OTHER; note = uracil
  modified_base 36: mod_base = OTHER; note = uracil
  modified_base 38: mod_base = OTHER; note = uracil
  modified_base 80: mod_base = OTHER; note = uracil
  modified_base 82: mod_base = OTHER; note = uracil
  modified_base 86: mod_base = OTHER; note = uracil
  modified_base 88..90: mod_base = OTHER; note = uracil
  modified_base 94: mod_base = OTHER; note = uracil
  modified_base 102: mod_base = OTHER; note = uracil
  modified_base 108: mod_base = OTHER; note = uracil
  modified_base 114: mod_base = OTHER; note = uracil
  modified_base 119: mod_base = OTHER; note = uracil
  modified_base 121: mod_base = OTHER; note = uracil
  modified_base 123: mod_base = OTHER; note = uracil
  modified_base 126: mod_base = OTHER; note = uracil
  modified_base 129..130: mod_base = OTHER; note = uracil
  modified_base 132: mod_base = OTHER; note = uracil
  modified_base 135..136: mod_base = OTHER; note = uracil
  modified_base 138..139: mod_base = OTHER; note = uracil
  modified_base 146: mod_base = OTHER; note = uracil
  modified_base 155: mod_base = OTHER; note = uracil
  modified_base 158: mod_base = OTHER; note = uracil
  modified_base 161..162: mod_base = OTHER; note = uracil
  modified_base 164: mod_base = OTHER; note = uracil
  modified_base 168: mod_base = OTHER; note = uracil
  modified_base 170..171: mod_base = OTHER; note = uracil
  modified_base 179: mod_base = OTHER; note = uracil
  modified_base 188: mod_base = OTHER; note = uracil
  modified_base 192: mod_base = OTHER; note = uracil
  modified_base 196..199: mod_base = OTHER; note = uracil
  modified_base 201..202: mod_base = OTHER; note = uracil
  modified_base 204: mod_base = OTHER; note = uracil
  modified_base 206..207: mod_base = OTHER; note = uracil
  modified_base 211: mod_base = OTHER; note = uracil
  modified_base 234: mod_base = OTHER; note = uracil
  modified_base 242: mod_base = OTHER; note = uracil
  modified_base 244..245: mod_base = OTHER; note = uracil
  modified_base 253..254: mod_base = OTHER; note = uracil
  modified_base 258: mod_base = OTHER; note = uracil
  modified_base 263: mod_base = OTHER; note = uracil
  modified_base 269: mod_base = OTHER; note = uracil
  modified_base 271..272: mod_base = OTHER; note = uracil
  modified_base 276..277: mod_base = OTHER; note = uracil
  modified_base 279: mod_base = OTHER; note = uracil
  modified_base 287..288: mod_base = OTHER; note = uracil
  modified_base 290..292: mod_base = OTHER; note = uracil
  modified_base 294..295: mod_base = OTHER; note = uracil
  modified_base 300: mod_base = OTHER; note = uracil
  modified_base 78: mod_base = m5c
  modified_base 140: mod_base = m5c
  modified_base 208: mod_base = m5c
  modified_base 297: mod_base = m5c
  variation 150: note = CpG site, residue is C if methylated or T(=U) if unmethylated
tttttgtgtgagttatgttttatatttaataagtatttaaaaaaagattttttttttttttttttaagatggagtgtcgttttgttatttaggttggagtgtagtggtatgattttggtttattgtaatttttgtttttcgggtttaagygatttttttgttttaggtttttgagtagttggaattataggtatgttttattatattcggttaatttttatatgtaatagaaataaggttttattatgttggttagataggttttgaatttttgattttaggtgatttatttatttcggt

SEQ ID NO: 290 - DNA, 300 bp, synthetic construct
  source 1..300: mol_type = other DNA
  modified_base 2: mod_base = OTHER; note = uracil
  modified_base 17: mod_base = OTHER; note = uracil
  modified_base 19..20: mod_base = OTHER; note = uracil
  modified_base 27: mod_base = OTHER; note = uracil
  modified_base 35: mod_base = OTHER; note = uracil
  modified_base 40..41: mod_base = OTHER; note = uracil
  modified_base 45: mod_base = OTHER; note = uracil
  modified_base 49..50: mod_base = OTHER; note = uracil
  modified_base 53: mod_base = OTHER; note = uracil
  modified_base 63..64: mod_base = OTHER; note = uracil
  modified_base 71: mod_base = OTHER; note = uracil
  modified_base 77: mod_base = OTHER; note = uracil
  modified_base 91: mod_base = OTHER; note = uracil
  modified_base 106: mod_base = OTHER; note = uracil
  modified_base 110..111: mod_base = OTHER; note = uracil
  modified_base 119..120: mod_base = OTHER; note = uracil
  modified_base 123: mod_base = OTHER; note = uracil
  modified_base 126: mod_base = OTHER; note = uracil
  modified_base 128: mod_base = OTHER; note = uracil
  modified_base 134..135: mod_base = OTHER; note = uracil
  modified_base 141: mod_base = OTHER; note = uracil
  modified_base 152: mod_base = OTHER; note = uracil
  modified_base 158..159: mod_base = OTHER; note = uracil
  modified_base 167: mod_base = OTHER; note = uracil
  modified_base 176: mod_base = OTHER; note = uracil
  modified_base 183..184: mod_base = OTHER; note = uracil
  modified_base 190: mod_base = OTHER; note = uracil
  modified_base 194..195: mod_base = OTHER; note = uracil
  modified_base 197: mod_base = OTHER; note = uracil
  modified_base 200: mod_base = OTHER; note = uracil
  modified_base 202: mod_base = OTHER; note = uracil
  modified_base 204..205: mod_base = OTHER; note = uracil
  modified_base 208..209: mod_base = OTHER; note = uracil
  modified_base 217: mod_base = OTHER; note = uracil
  modified_base 225: mod_base = OTHER; note = uracil
  modified_base 227: mod_base = OTHER; note = uracil
  modified_base 229..230: mod_base = OTHER; note = uracil
  modified_base 233: mod_base = OTHER; note = uracil
  modified_base 255: mod_base = OTHER; note = uracil
  modified_base 268: mod_base = OTHER; note = uracil
  modified_base 284: mod_base = OTHER; note = uracil
  modified_base 289: mod_base = OTHER; note = uracil
  modified_base 291: mod_base = OTHER; note = uracil
  modified_base 293: mod_base = OTHER; note = uracil
  modified_base 295: mod_base = OTHER; note = uracil
  modified_base 3: mod_base = m5c
  modified_base 92: mod_base = m5c
  modified_base 160: mod_base = m5c
  modified_base 222: mod_base = m5c
  variation 150: note = CpG site, residue is C if methylated or T(=U) if unmethylated
gtcgaggtgggtggattatttgaggttaggagtttaagatttgtttggttaatatggtgaaattttgtttttattatatataaaaattagtcgggtgtggtggggtatgtttgtaattttagttatttaggagtttgaggtagaagaatygtttgaattcgggaggtagaggttgtagtgagttaagattatgttattgtattttagtttgggtgatagagcgatattttattttaaaaaaaaaaaaaaaaaatttttttttgagtatttgttggatataagatatgatttatataaaga

SEQ ID NO: 291 - DNA, 300 bp, synthetic construct
  source 1..300: mol_type = other DNA
  modified_base 2..3: mod_base = OTHER; note = uracil
  modified_base 5..9: mod_base = OTHER; note = uracil
  modified_base 13..16: mod_base = OTHER; note = uracil
  modified_base 18: mod_base = OTHER; note = uracil
  modified_base 23: mod_base = OTHER; note = uracil
  modified_base 25: mod_base = OTHER; note = uracil
  modified_base 27..29: mod_base = OTHER; note = uracil
  modified_base 32: mod_base = OTHER; note = uracil
  modified_base 34..35: mod_base = OTHER; note = uracil
  modified_base 42..45: mod_base = OTHER; note = uracil
  modified_base 50: mod_base = OTHER; note = uracil
  modified_base 52..54: mod_base = OTHER; note = uracil
  modified_base 59: mod_base = OTHER; note = uracil
  modified_base 67: mod_base = OTHER; note = uracil
  modified_base 73: mod_base = OTHER; note = uracil
  modified_base 79: mod_base = OTHER; note = uracil
  modified_base 86: mod_base = OTHER; note = uracil
  modified_base 97..98: mod_base = OTHER; note = uracil
  modified_base 106: mod_base = OTHER; note = uracil
  modified_base 118..119: mod_base = OTHER; note = uracil
  modified_base 124: mod_base = OTHER; note = uracil
  modified_base 126..127: mod_base = OTHER; note = uracil
  modified_base 131..132: mod_base = OTHER; note = uracil
  modified_base 148..149: mod_base = OTHER; note = uracil
  modified_base 153: mod_base = OTHER; note = uracil
  modified_base 155: mod_base = OTHER; note = uracil
  modified_base 159..160: mod_base = OTHER; note = uracil
  modified_base 163: mod_base = OTHER; note = uracil
  modified_base 173: mod_base = OTHER; note = uracil
  modified_base 176: mod_base = OTHER; note = uracil
  modified_base 179: mod_base = OTHER; note = uracil
  modified_base 188..189: mod_base = OTHER; note = uracil
  modified_base 200..201: mod_base = OTHER; note = uracil
  modified_base 204: mod_base = OTHER; note = uracil
  modified_base 206: mod_base = OTHER; note = uracil
  modified_base 228..230: mod_base = OTHER; note = uracil
  modified_base 236..238: mod_base = OTHER; note = uracil
  modified_base 263: mod_base = OTHER; note = uracil
  modified_base 268..269: mod_base = OTHER; note = uracil
  modified_base 290..291: mod_base = OTHER; note = uracil
  modified_base 74: mod_base = m5c
  modified_base 120: mod_base = m5c
  modified_base 190: mod_base = m5c
  variation 150: note = CpG site, residue is C if methylated or T(=U) if unmethylated
attattttttgattttttatgatttatttagtttttaagtgtttttgggtatttagttttttgtggtatgggtcggtgtaagtttttatatgagagttagagagatagggagggaggttcgggtttttggttttttgggaaaagatgttygttttagattagtaaaaggaggtagttgttttaggagttcgggaaaatgttattattgatagtattattattatttttttattttttttttgtgtttttaaaatgaaaagtttagatttatggggtagggtagagtgggtttggagggag

SEQ ID NO: 292 - DNA, 300 bp, synthetic construct
  source 1..300: mol_type = other DNA
  modified_base 2..4: mod_base = OTHER; note = uracil
  modified_base 6..7: mod_base = OTHER; note = uracil
  modified_base 11..13: mod_base = OTHER; note = uracil
  modified_base 15: mod_base = OTHER; note = uracil
  modified_base 17: mod_base = OTHER; note = uracil
  modified_base 20..22: mod_base = OTHER; note = uracil
  modified_base 25..28: mod_base = OTHER; note = uracil
  modified_base 35: mod_base = OTHER; note = uracil
  modified_base 40: mod_base = OTHER; note = uracil
  modified_base 45: mod_base = OTHER; note = uracil
  modified_base 56: mod_base = OTHER; note = uracil
  modified_base 58: mod_base = OTHER; note = uracil
  modified_base 88: mod_base = OTHER; note = uracil
  modified_base 92: mod_base = OTHER; note = uracil
  modified_base 101: mod_base = OTHER; note = uracil
  modified_base 107..108: mod_base = OTHER; note = uracil
  modified_base 113: mod_base = OTHER; note = uracil
  modified_base 115..116: mod_base = OTHER; note = uracil
  modified_base 122: mod_base = OTHER; note = uracil
  modified_base 125: mod_base = OTHER; note = uracil
  modified_base 128..129: mod_base = OTHER; note = uracil
  modified_base 131..132: mod_base = OTHER; note = uracil
  modified_base 138: mod_base = OTHER; note = uracil
  modified_base 143: mod_base = OTHER; note = uracil
  modified_base 153: mod_base = OTHER; note = uracil
  modified_base 156: mod_base = OTHER; note = uracil
  modified_base 161..163: mod_base = OTHER; note = uracil
  modified_base 170..171: mod_base = OTHER; note = uracil
  modified_base 177..178: mod_base = OTHER; note = uracil
  modified_base 183..184: mod_base = OTHER; note = uracil
  modified_base 186..188: mod_base = OTHER; note = uracil
  modified_base 190..192: mod_base = OTHER; note = uracil
  modified_base 196: mod_base = OTHER; note = uracil
  modified_base 198: mod_base = OTHER; note = uracil
  modified_base 200: mod_base = OTHER; note = uracil
  modified_base 204: mod_base = OTHER; note = uracil
  modified_base 206: mod_base = OTHER; note = uracil
  modified_base 208: mod_base = OTHER; note = uracil
  modified_base 218: mod_base = OTHER; note = uracil
  modified_base 222: mod_base = OTHER; note = uracil
  modified_base 224: mod_base = OTHER; note = uracil
  modified_base 228..230: mod_base = OTHER; note = uracil
  modified_base 234..235: mod_base = OTHER; note = uracil
  modified_base 237: mod_base = OTHER; note = uracil
  modified_base 244: mod_base = OTHER; note = uracil
  modified_base 251..253: mod_base = OTHER; note = uracil
  modified_base 259: mod_base = OTHER; note = uracil
  modified_base 261: mod_base = OTHER; note = uracil
  modified_base 269: mod_base = OTHER; note = uracil
  modified_base 279: mod_base = OTHER; note = uracil
  modified_base 289: mod_base = OTHER; note = uracil
  modified_base 109: mod_base = m5c
  modified_base 179: mod_base = m5c
  modified_base 225: mod_base = m5c
  variation 149: note = CpG site, residue is C if methylated or T(=U) if unmethylated
tttttttaggtttattttattttattttatggatttgaattttttattttaaaaatataaagggaaaatgggaaaataataataatattattagtgatggtattttttcgggtttttaaagtagttgtttttttttgttggtttgagaygggtatttttttttaaaaggttaggagttcgggtttttttttttgtttttttggtttttatatagaaatttgtatcggtttatgttataaagaattgggtgtttaggggtatttaggagttgggtgagttatgaggggttagggggtggtt

SEQ ID NO: 293 - DNA, 300 bp, synthetic construct
  source 1..300: mol_type = other DNA
  modified_base 2: mod_base = OTHER; note = uracil
  modified_base 5: mod_base = OTHER; note = uracil
  modified_base 9: mod_base = OTHER; note = uracil
  modified_base 12..16: mod_base = OTHER; note = uracil
  modified_base 22..24: mod_base = OTHER; note = uracil
  modified_base 28: mod_base = OTHER; note = uracil
  modified_base 30: mod_base = OTHER; note = uracil
  modified_base 32..36: mod_base = OTHER; note = uracil
  modified_base 38: mod_base = OTHER; note = uracil
  modified_base 41..43: mod_base = OTHER; note = uracil
  modified_base 45: mod_base = OTHER; note = uracil
  modified_base 47: mod_base = OTHER; note = uracil
  modified_base 52: mod_base = OTHER; note = uracil
  modified_base 55..57: mod_base = OTHER; note = uracil
  modified_base 60: mod_base = OTHER; note = uracil
  modified_base 64..65: mod_base = OTHER; note = uracil
  modified_base 93: mod_base = OTHER; note = uracil
  modified_base 100..102: mod_base = OTHER; note = uracil
  modified_base 115: mod_base = OTHER; note = uracil
  modified_base 118: mod_base = OTHER; note = uracil
  modified_base 120..121: mod_base = OTHER; note = uracil
  modified_base 132: mod_base = OTHER; note = uracil
  modified_base 134: mod_base = OTHER; note = uracil
  modified_base 138..139: mod_base = OTHER; note = uracil
  modified_base 153: mod_base = OTHER; note = uracil
  modified_base 155: mod_base = OTHER; note = uracil
  modified_base 159: mod_base = OTHER; note = uracil
  modified_base 166: mod_base = OTHER; note = uracil
  modified_base 171..172: mod_base = OTHER; note = uracil
  modified_base 178: mod_base = OTHER; note = uracil
  modified_base 180: mod_base = OTHER; note = uracil
  modified_base 188..189: mod_base = OTHER; note = uracil
  modified_base 196: mod_base = OTHER; note = uracil
  modified_base 199: mod_base = OTHER; note = uracil
  modified_base 202..203: mod_base = OTHER; note = uracil
  modified_base 207..210: mod_base = OTHER; note = uracil
  modified_base 221: mod_base = OTHER; note = uracil
  modified_base 223: mod_base = OTHER; note = uracil
  modified_base 225..227: mod_base = OTHER; note = uracil
  modified_base 230..232: mod_base = OTHER; note = uracil
  modified_base 235..236: mod_base = OTHER; note = uracil
  modified_base 243: mod_base = OTHER; note = uracil
  modified_base 248..250: mod_base = OTHER; note = uracil
  modified_base 259: mod_base = OTHER; note = uracil
  modified_base 264..266: mod_base = OTHER; note = uracil
  modified_base 271..272: mod_base = OTHER; note = uracil
  modified_base 274: mod_base = OTHER; note = uracil
  modified_base 276..277: mod_base = OTHER; note = uracil
  modified_base 279: mod_base = OTHER; note = uracil
  modified_base 281..282: mod_base = OTHER; note = uracil
  modified_base 286: mod_base = OTHER; note = uracil
  modified_base 288..289: mod_base = OTHER; note = uracil
  modified_base 294: mod_base = OTHER; note = uracil
  modified_base 296: mod_base = OTHER; note = uracil
  modified_base 299..300: mod_base = OTHER; note = uracil
  modified_base 7: mod_base = m5c
  modified_base 61: mod_base = m5c
  modified_base 103: mod_base = m5c
  modified_base 124: mod_base = m5c
  modified_base 135: mod_base = m5c
  modified_base 181: mod_base = m5c
  modified_base 200: mod_base = m5c
  modified_base 205: mod_base = m5c
  modified_base 212: mod_base = m5c
  variation 151: note = CpG site, residue is C if methylated or T(=U) if unmethylated
gtagtacgtagtttttaggggttttaatttattttttttttttttatagggtttttttgtcgtttagtgttgggtgagaaaggtggaggggatatgtagtttcggatggaggtgtagtattaacgagagagtttcggtttgtgggagggaygtttaggtttaggttaaagttaggagtttcgggaaatttgggtttagtcgttacgttttacggaggggatatatttttttttgtttgatggtagggtttatggtagataaaatttatgattttattttttttggttttagggtttagtt

SEQ ID NO: 294 - DNA, 300 bp, synthetic construct
  source 1..300: mol_type = other DNA
  modified_base 3: mod_base = OTHER; note = uracil
  modified_base 8..10: mod_base = OTHER; note = uracil
  modified_base 16..17: mod_base = OTHER; note = uracil
  modified_base 32: mod_base = OTHER; note = uracil
  modified_base 44: mod_base = OTHER; note = uracil
  modified_base 47..48: mod_base = OTHER; note = uracil
  modified_base 54..56: mod_base = OTHER; note = uracil
  modified_base 59..60: mod_base = OTHER; note = uracil
  modified_base 63: mod_base = OTHER; note = uracil
  modified_base 67: mod_base = OTHER; note = uracil
  modified_base 82..85: mod_base = OTHER; note = uracil
  modified_base 87: mod_base = OTHER; note = uracil
  modified_base 103: mod_base = OTHER; note = uracil
  modified_base 108..110: mod_base = OTHER; note = uracil
  modified_base 117..118: mod_base = OTHER; note = uracil
  modified_base 124: mod_base = OTHER; note = uracil
  modified_base 126..127: mod_base = OTHER; note = uracil
  modified_base 131: mod_base = OTHER; note = uracil
  modified_base 137..138: mod_base = OTHER; note = uracil
  modified_base 143..144: mod_base = OTHER; note = uracil
  modified_base 152..154: mod_base = OTHER; note = uracil
  modified_base 156..158: mod_base = OTHER; note = uracil
  modified_base 160: mod_base = OTHER; note = uracil
  modified_base 164: mod_base = OTHER; note = uracil
  modified_base 170: mod_base = OTHER; note = uracil
  modified_base 172: mod_base = OTHER; note = uracil
  modified_base 174: mod_base = OTHER; note = uracil
  modified_base 184: mod_base = OTHER; note = uracil
  modified_base 187: mod_base = OTHER; note = uracil
  modified_base 189..190: mod_base = OTHER; note = uracil
  modified_base 192..193: mod_base = OTHER; note = uracil
  modified_base 196: mod_base = OTHER; note = uracil
  modified_base 202: mod_base = OTHER; note = uracil
  modified_base 205: mod_base = OTHER; note = uracil
  modified_base 210..213: mod_base = OTHER; note = uracil
  modified_base 215..216: mod_base = OTHER; note = uracil
  modified_base 218..219: mod_base = OTHER; note = uracil
  modified_base 223: mod_base = OTHER; note = uracil
  modified_base 225: mod_base = OTHER; note = uracil
  modified_base 227..229: mod_base = OTHER; note = uracil
  modified_base 232: mod_base = OTHER; note = uracil
  modified_base 234: mod_base = OTHER; note = uracil
  modified_base 242: mod_base = OTHER; note = uracil
  modified_base 250..252: mod_base = OTHER; note = uracil
  modified_base 280..283: mod_base = OTHER; note = uracil
  modified_base 290: mod_base = OTHER; note = uracil
  modified_base 297: mod_base = OTHER; note = uracil
  modified_base 300: mod_base = OTHER; note = uracil
  modified_base 88: mod_base = m5c
  modified_base 95: mod_base = m5c
  modified_base 100: mod_base = m5c
  modified_base 119: mod_base = m5c
  modified_base 165: mod_base = m5c
  modified_base 176: mod_base = m5c
  modified_base 197: mod_base = m5c
  modified_base 239: mod_base = m5c
  modified_base 293: mod_base = m5c
  variation 149: note = CpG site, residue is C if methylated or T(=U) if unmethylated
ggttgagttttggagttaggagaggtgaggttatgggttttgtttattatgggttttgttattaggtagggaagggtgtgtttttttcgtggggcgtggcggttgaatttaggtttttcggagtttttggttttgatttaagtttgagygttttttttataggtcggagttttttcgttggtgttgtatttttattcggggttatatgttttttttattttttttatttaatattggacggtagggaagttttgtgagggaagagggggtgagttagggtttttgggggttgcgtgttgt

SEQ ID NO: 295 - DNA, 300 bp, synthetic construct
  source 1..300: mol_type = other DNA
  modified_base 5: mod_base = OTHER; note = uracil
  modified_base 9: mod_base = OTHER; note = uracil
  modified_base 12..13: mod_base = OTHER; note = uracil
  modified_base 17: mod_base = OTHER; note = uracil
  modified_base 30: mod_base = OTHER; note = uracil
  modified_base 33: mod_base = OTHER; note = uracil
  modified_base 49: mod_base = OTHER; note = uracil
  modified_base 56: mod_base = OTHER; note = uracil
  modified_base 60..61: mod_base = OTHER; note = uracil
  modified_base 64: mod_base = OTHER; note = uracil
  modified_base 66: mod_base = OTHER; note = uracil
  modified_base 80: mod_base = OTHER; note = uracil
  modified_base 84: mod_base = OTHER; note = uracil
  modified_base 92..95: mod_base = OTHER; note = uracil
  modified_base 102: mod_base = OTHER; note = uracil
  modified_base 105: mod_base = OTHER; note = uracil
  modified_base 121: mod_base = OTHER; note = uracil
  modified_base 123: mod_base = OTHER; note = uracil
  modified_base 126: mod_base = OTHER; note = uracil
  modified_base 134: mod_base = OTHER; note = uracil
  modified_base 155..156: mod_base = OTHER; note = uracil
  modified_base 163: mod_base = OTHER; note = uracil
  modified_base 172: mod_base = OTHER; note = uracil
  modified_base 174..175: mod_base = OTHER; note = uracil
  modified_base 187..188: mod_base = OTHER; note = uracil
  modified_base 191: mod_base = OTHER; note = uracil
  modified_base 196: mod_base = OTHER; note = uracil
  modified_base 201..202: mod_base = OTHER; note = uracil
  modified_base 205: mod_base = OTHER; note = uracil
  modified_base 210: mod_base = OTHER; note = uracil
  modified_base 212: mod_base = OTHER; note = uracil
  modified_base 216..217: mod_base = OTHER; note = uracil
  modified_base 220..221: mod_base = OTHER; note = uracil
  modified_base 230: mod_base = OTHER; note = uracil
  modified_base 233: mod_base = OTHER; note = uracil
  modified_base 236: mod_base = OTHER; note = uracil
  modified_base 261: mod_base = OTHER; note = uracil
  modified_base 267: mod_base = OTHER; note = uracil
  modified_base 269..270: mod_base = OTHER; note = uracil
  modified_base 272: mod_base = OTHER; note = uracil
  modified_base 283: mod_base = OTHER; note = uracil
  modified_base 294: mod_base = OTHER; note = uracil
  modified_base 299: mod_base = OTHER; note = uracil
  modified_base 45: mod_base = m5c
  modified_base 54: mod_base = m5c
  modified_base 96: mod_base = m5c
  modified_base 117: mod_base = m5c
  modified_base 164: mod_base = m5c
  modified_base 194: mod_base = m5c
  variation 150: note = CpG site, residue is C if methylated or T(=U) if unmethylated
atttttttttatttgttattgaagtgaattattagtataagtagcgagttgggcgtatttttttttagttgtgttaaaatttgttggtattttttcggtattagtagaggtgtgtacgggtattgttttaaaattgggaaggaggaagaygaggttagggagtcggagggttattaaggtagatttttagtagcgttagtttagttgaatattttttagttttgttttttagtagttttgaggaaaagtataggtaagaataaagatattattgtatgtttgttatatgaatgtataata

SEQ ID NO: 296 - DNA, 300 bp, synthetic construct
  source 1..300: mol_type = other DNA
  modified_base 7: mod_base = OTHER; note = uracil
  modified_base 11: mod_base = OTHER; note = uracil
  modified_base 18: mod_base = OTHER; note = uracil
  modified_base 22: mod_base = OTHER; note = uracil
  modified_base 26: mod_base = OTHER; note = uracil
  modified_base 35: mod_base = OTHER; note = uracil
  modified_base 42: mod_base = OTHER; note = uracil
  modified_base 46..47: mod_base = OTHER; note = uracil
  modified_base 52: mod_base = OTHER; note = uracil
  modified_base 57..58: mod_base = OTHER; note = uracil
  modified_base 60: mod_base = OTHER; note = uracil
  modified_base 65: mod_base = OTHER; note = uracil
  modified_base 68: mod_base = OTHER; note = uracil
  modified_base 76: mod_base = OTHER; note = uracil
  modified_base 81: mod_base = OTHER; note = uracil
  modified_base 93: mod_base = OTHER; note = uracil
  modified_base 96: mod_base = OTHER; note = uracil
  modified_base 101: mod_base = OTHER; note = uracil
  modified_base 107: mod_base = OTHER; note = uracil
  modified_base 110: mod_base = OTHER; note = uracil
  modified_base 118: mod_base = OTHER; note = uracil
  modified_base 121..122: mod_base = OTHER; note = uracil
  modified_base 130..132: mod_base = OTHER; note = uracil
  modified_base 134: mod_base = OTHER; note = uracil
  modified_base 138: mod_base = OTHER; note = uracil
  modified_base 140..142: mod_base = OTHER; note = uracil
  modified_base 146..147: mod_base = OTHER; note = uracil
  modified_base 152: mod_base = OTHER; note = uracil
  modified_base 155..156: mod_base = OTHER; note = uracil
  modified_base 158..159: mod_base = OTHER; note = uracil
  modified_base 162..164: mod_base = OTHER; note = uracil
  modified_base 175: mod_base = OTHER; note = uracil
  modified_base 180..181: mod_base = OTHER; note = uracil
  modified_base 186: mod_base = OTHER; note = uracil
  modified_base 188: mod_base = OTHER; note = uracil
  modified_base 190..191: mod_base = OTHER; note = uracil
  modified_base 193: mod_base = OTHER; note = uracil
  modified_base 196: mod_base = OTHER; note = uracil
  modified_base 202: mod_base = OTHER; note = uracil
  modified_base 213..214: mod_base = OTHER; note = uracil
  modified_base 217: mod_base = OTHER; note = uracil
  modified_base 227: mod_base = OTHER; note = uracil
  modified_base 229: mod_base = OTHER; note = uracil
  modified_base 232: mod_base = OTHER; note = uracil
  modified_base 247..249: mod_base = OTHER; note = uracil
  modified_base 252: mod_base = OTHER; note = uracil
  modified_base 256: mod_base = OTHER; note = uracil
  modified_base 259: mod_base = OTHER; note = uracil
  modified_base 265: mod_base = OTHER; note = uracil
  modified_base 274: mod_base = OTHER; note = uracil
  modified_base 276: mod_base = OTHER; note = uracil
  modified_base 279: mod_base = OTHER; note = uracil
  modified_base 285: mod_base = OTHER; note = uracil
  modified_base 105: mod_base = m5c
  modified_base 135: mod_base = m5c
  modified_base 182: mod_base = m5c
  modified_base 203: mod_base = m5c
  modified_base 245: mod_base = m5c
  modified_base 254: mod_base = m5c
  variation 149: note = CpG site, residue is C if methylated or T(=U) if unmethylated
gttatgtatttatatagtaaatatatagtggtgtttttgtttttatttatatttttttttaaagttgttgaaaaataaggttggaaagtgtttagttggattagcgttgttggaaatttattttggtgatttttcggttttttggtttygttttttttttttttagttttaaagtagtgttcgtatatatttttgttgatatcgggggaatattagtaagttttaatataattgagaaggaatgcgtttagttcgttatttatattgatgatttattttaatgataggtagaaagaaatg

SEQ ID NO: 297 - DNA, 300 bp, synthetic construct
  source 1..300: mol_type = other DNA
  modified_base 7: mod_base = OTHER; note = uracil
  modified_base 12..13: mod_base = OTHER; note = uracil
  modified_base 15: mod_base = OTHER; note = uracil
  modified_base 19: mod_base = OTHER; note = uracil
  modified_base 23: mod_base = OTHER; note = uracil
  modified_base 25..26: mod_base = OTHER; note = uracil
  modified_base 28..30: mod_base = OTHER; note = uracil
  modified_base 32..33: mod_base = OTHER; note = uracil
  modified_base 41: mod_base = OTHER; note = uracil
  modified_base 44..45: mod_base = OTHER; note = uracil
  modified_base 54: mod_base = OTHER; note = uracil
  modified_base 57: mod_base = OTHER; note = uracil
  modified_base 60..61: mod_base = OTHER; note = uracil
  modified_base 69: mod_base = OTHER; note = uracil
  modified_base 72: mod_base = OTHER; note = uracil
  modified_base 80: mod_base = OTHER; note = uracil
  modified_base 86..87: mod_base = OTHER; note = uracil
  modified_base 89: mod_base = OTHER; note = uracil
  modified_base 97..99: mod_base = OTHER; note = uracil
  modified_base 106..109: mod_base = OTHER; note = uracil
  modified_base 111: mod_base = OTHER; note = uracil
  modified_base 113: mod_base = OTHER; note = uracil
  modified_base 117..118: mod_base = OTHER; note = uracil
  modified_base 121: mod_base = OTHER; note = uracil
  modified_base 123..127: mod_base = OTHER; note = uracil
  modified_base 138: mod_base = OTHER; note = uracil
  modified_base 145: mod_base = OTHER; note = uracil
  modified_base 154: mod_base = OTHER; note = uracil
  modified_base 157..160: mod_base = OTHER; note = uracil
  modified_base 162..166: mod_base = OTHER; note = uracil
  modified_base 168: mod_base = OTHER; note = uracil
  modified_base 174..175: mod_base = OTHER; note = uracil
  modified_base 181: mod_base = OTHER; note = uracil
  modified_base 183: mod_base = OTHER; note = uracil
  modified_base 195: mod_base = OTHER; note = uracil
  modified_base 198..201: mod_base = OTHER; note = uracil
  modified_base 204..205: mod_base = OTHER; note = uracil
  modified_base 207..208: mod_base = OTHER; note = uracil
  modified_base 210: mod_base = OTHER; note = uracil
  modified_base 220: mod_base = OTHER; note = uracil
  modified_base 224: mod_base = OTHER; note = uracil
  modified_base 234..235: mod_base = OTHER; note = uracil
  modified_base 238: mod_base = OTHER; note = uracil
  modified_base 240..241: mod_base = OTHER; note = uracil
  modified_base 243..245: mod_base = OTHER; note = uracil
  modified_base 248..249: mod_base = OTHER; note = uracil
  modified_base 252..256: mod_base = OTHER; note = uracil
  modified_base 258: mod_base = OTHER; note = uracil
  modified_base 261..262: mod_base = OTHER; note = uracil
  modified_base 266..267: mod_base = OTHER; note = uracil
  modified_base 271: mod_base = OTHER; note = uracil
  modified_base 277..278: mod_base = OTHER; note = uracil
  modified_base 280: mod_base = OTHER; note = uracil
  modified_base 283: mod_base = OTHER; note = uracil
  modified_base 285: mod_base = OTHER; note = uracil
  modified_base 290: mod_base = OTHER; note = uracil
  modified_base 293: mod_base = OTHER; note = uracil
  modified_base 298..299: mod_base = OTHER; note = uracil
  modified_base 34: mod_base = m5c
  modified_base 101: mod_base = m5c
  modified_base 147: mod_base = m5c
  modified_base 169: mod_base = m5c
  modified_base 202: mod_base = m5c
  modified_base 225: mod_base = m5c
  variation 150: note = CpG site, residue is C if methylated or T(=U) if unmethylated
attggtttggttttttttttaatattttttattcgggatgtagttaagagtggttgtagtttaattttttatatgtaaataatgattttagtgatgtttacggggtttttttttggttttttttttttgggaaaagattgagttttcgaygggtatttttttttttttcggaattaagggttttgggatgttgatagttttcgttatttttgagaagggtaggtcgtggaaaattatttttttttttttttttttttttgttttttttagttggggtttttgtataatgtagttgggtta

SEQ ID NO: 298 - DNA, 300 bp, synthetic construct
  source 1..300: mol_type = other DNA
  modified_base 4..6: mod_base = OTHER; note = uracil
  modified_base 9: mod_base = OTHER; note = uracil
  modified_base 12: mod_base = OTHER; note = uracil
  modified_base 19: mod_base = OTHER; note = uracil
  modified_base 25..28: mod_base = OTHER; note = uracil
  modified_base 31: mod_base = OTHER; note = uracil
  modified_base 41: mod_base = OTHER; note = uracil
  modified_base 72..73: mod_base = OTHER; note = uracil
  modified_base 78..79: mod_base = OTHER; note = uracil
  modified_base 82..84: mod_base = OTHER; note = uracil
  modified_base 87: mod_base = OTHER; note = uracil
  modified_base 89: mod_base = OTHER; note = uracil
  modified_base 104: mod_base = OTHER; note = uracil
  modified_base 108: mod_base = OTHER; note = uracil
  modified_base 111: mod_base = OTHER; note = uracil
  modified_base 114..116: mod_base = OTHER; note = uracil
  modified_base 121..123: mod_base = OTHER; note = uracil
  modified_base 130: mod_base = OTHER; note = uracil
  modified_base 148..149: mod_base = OTHER; note = uracil
  modified_base 159: mod_base = OTHER; note = uracil
  modified_base 161: mod_base = OTHER; note = uracil
  modified_base 165: mod_base = OTHER; note = uracil
  modified_base 170..172: mod_base = OTHER; note = uracil
  modified_base 185..186: mod_base = OTHER; note = uracil
  modified_base 196..198: mod_base = OTHER; note = uracil
  modified_base 205: mod_base = OTHER; note = uracil
  modified_base 208: mod_base = OTHER; note = uracil
  modified_base 210: mod_base = OTHER; note = uracil
  modified_base 217: mod_base = OTHER; note = uracil
  modified_base 226: mod_base = OTHER; note = uracil
  modified_base 242: mod_base = OTHER; note = uracil
  modified_base 245: mod_base = OTHER; note = uracil
  modified_base 248..249: mod_base = OTHER; note = uracil
  modified_base 251: mod_base = OTHER; note = uracil
  modified_base 253: mod_base = OTHER; note = uracil
  modified_base 258: mod_base = OTHER; note = uracil
  modified_base 261: mod_base = OTHER; note = uracil
  modified_base 264..265: mod_base = OTHER; note = uracil
  modified_base 291..292: mod_base = OTHER; note = uracil
  modified_base 296..297: mod_base = OTHER; note = uracil
  modified_base 75: mod_base = m5c
  modified_base 98: mod_base = m5c
  modified_base 131: mod_base = m5c
  modified_base 153: mod_base = m5c
  modified_base 199: mod_base = m5c
  modified_base 266: mod_base = m5c
  variation 150: note = CpG site, residue is C if methylated or T(=U) if unmethylated
tggtttagttgtattgtgtagaggttttagttaggaaaggtagagggggaaggaagggaggagatggttttttacggtttgttttttttagaggtggcgggggttgttaatattttagagtttttggtttcggagggggaggggatgttygtcgagaatttagtttttttttagggggagaaggttagagaggggtttcgtgggtattattgaggttattgtttatatgtagaaaattaggttgtagttatttttggttgtatttcgggtgggaggtgttagaaagaggattagattaat

SEQ ID NO: 299 - DNA, 300 bp, synthetic construct
  source 1..300: mol_type = other DNA
  modified_base 4..6: mod_base = OTHER; note = uracil
  modified_base 8: mod_base = OTHER; note = uracil
  modified_base 11: mod_base = OTHER; note = uracil
  modified_base 13..14: mod_base = OTHER; note = uracil
  modified_base 18: mod_base = OTHER; note = uracil
  modified_base 37..38: mod_base = OTHER; note = uracil
  modified_base 42..43: mod_base = OTHER; note = uracil
  modified_base 46: mod_base = OTHER; note = uracil
  modified_base 54..55: mod_base = OTHER; note = uracil
  modified_base 57: mod_base = OTHER; note = uracil
  modified_base 60: mod_base = OTHER; note = uracil
  modified_base 62: mod_base = OTHER; note = uracil
  modified_base 64: mod_base = OTHER; note = uracil
  modified_base 68..70: mod_base = OTHER; note = uracil
  modified_base 79: mod_base = OTHER; note = uracil
  modified_base 84..85: mod_base = OTHER; note = uracil
  modified_base 87..88: mod_base = OTHER; note = uracil
  modified_base 91..92: mod_base = OTHER; note = uracil
  modified_base 97..99: mod_base = OTHER; note = uracil
  modified_base 101: mod_base = OTHER; note = uracil
  modified_base 104: mod_base = OTHER; note = uracil
  modified_base 106..108: mod_base = OTHER; note = uracil
  modified_base 110: mod_base = OTHER; note = uracil
  modified_base 114..116: mod_base = OTHER; note = uracil
  modified_base 119: mod_base = OTHER; note = uracil
  modified_base 122: mod_base = OTHER; note = uracil
  modified_base 124: mod_base = OTHER; note = uracil
  modified_base 126..129: mod_base = OTHER; note = uracil
  modified_base 131: mod_base = OTHER; note = uracil
  modified_base 133..134: mod_base = OTHER; note = uracil
  modified_base 136: mod_base = OTHER; note = uracil
  modified_base 139..140: mod_base = OTHER; note = uracil
  modified_base 142: mod_base = OTHER; note = uracil
  modified_base 146..148: mod_base = OTHER; note = uracil
  modified_base 151..152: mod_base = OTHER; note = uracil
  modified_base 163..166: mod_base = OTHER; note = uracil
  modified_base 170: mod_base = OTHER; note = uracil
  modified_base 175: mod_base = OTHER; note = uracil
  modified_base 177..180: mod_base = OTHER; note = uracil
  modified_base 183: mod_base = OTHER; note = uracil
  modified_base 186: mod_base = OTHER; note = uracil
  modified_base 199..200: mod_base = OTHER; note = uracil
  modified_base 202: mod_base = OTHER; note = uracil
  modified_base 205..206: mod_base = OTHER; note = uracil
  modified_base 210: mod_base = OTHER; note = uracil
  modified_base 212: mod_base = OTHER; note = uracil
  modified_base 215..216: mod_base = OTHER; note = uracil
  modified_base 219..220: mod_base = OTHER; note = uracil
  modified_base 225..226: mod_base = OTHER; note = uracil
  modified_base 228..229: mod_base = OTHER; note = uracil
  modified_base 234: mod_base = OTHER; note = uracil
  modified_base 239: mod_base = OTHER; note = uracil
  modified_base 241: mod_base = OTHER; note = uracil
  modified_base 243..244: mod_base = OTHER; note = uracil
  modified_base 250: mod_base = OTHER; note = uracil
  modified_base 258: mod_base = OTHER; note = uracil
  modified_base 267..268: mod_base = OTHER; note = uracil
  modified_base 272: mod_base = OTHER; note = uracil
  modified_base 275..277: mod_base = OTHER; note = uracil
  modified_base 279: mod_base = OTHER; note = uracil
  modified_base 297: mod_base = OTHER; note = uracil
  modified_base 111: mod_base = m5c
  modified_base 167: mod_base = m5c
  modified_base 203: mod_base = m5c
  modified_base 245: mod_base = m5c
  modified_base 281: mod_base = m5c
  modified_base 288: mod_base = m5c
  variation 149: note = CpG site, residue is C if methylated or T(=U) if unmethylated
ttgtttttatttttaggttttggaggagggtaggtgtttggttagtagagtggttattgtttattggtttagaggaagtaaggttattagtttgattttattttttttttcggtttatttttatttttttttttttaattataagtttygttaaaatagagattttcggttttgtttttttgttgtaggaagggagagttatcgttagatattgtttgtttggtttttttgttttgattttattcggtgtttggaattaaagaggatttggtttttttttcgggatacgtgatttttttt

SEQ ID NO: 300 - DNA, 300 bp, synthetic construct
  source 1..300: mol_type = other DNA
  modified_base 9: mod_base = OTHER; note = uracil
  modified_base 16..17: mod_base = OTHER; note = uracil
  modified_base 29..30: mod_base = OTHER; note = uracil
  modified_base 35..36: mod_base = OTHER; note = uracil
  modified_base 38: mod_base = OTHER; note = uracil
  modified_base 46..47: mod_base = OTHER; note = uracil
  modified_base 51: mod_base = OTHER; note = uracil
  modified_base 53: mod_base = OTHER; note = uracil
  modified_base 64: mod_base = OTHER; note = uracil
  modified_base 69: mod_base = OTHER; note = uracil
  modified_base 77..78: mod_base = OTHER; note = uracil
  modified_base 82: mod_base = OTHER; note = uracil
  modified_base 86: mod_base = OTHER; note = uracil
  modified_base 92: mod_base = OTHER; note = uracil
  modified_base 102: mod_base = OTHER; note = uracil
  modified_base 104: mod_base = OTHER; note = uracil
  modified_base 106..108: mod_base = OTHER; note = uracil
  modified_base 111..112: mod_base = OTHER; note = uracil
  modified_base 115: mod_base = OTHER; note = uracil
  modified_base 118: mod_base = OTHER; note = uracil
  modified_base 126: mod_base = OTHER; note = uracil
  modified_base 131: mod_base = OTHER; note = uracil
  modified_base 139: mod_base = OTHER; note = uracil
  modified_base 141: mod_base = OTHER; note = uracil
  modified_base 155: mod_base = OTHER; note = uracil
  modified_base 187: mod_base = OTHER; note = uracil
  modified_base 206: mod_base = OTHER; note = uracil
  modified_base 210: mod_base = OTHER; note = uracil
  modified_base 217..218: mod_base = OTHER; note = uracil
  modified_base 222: mod_base = OTHER; note = uracil
  modified_base 225..226: mod_base = OTHER; note = uracil
  modified_base 228: mod_base = OTHER; note = uracil
  modified_base 233..234: mod_base = OTHER; note = uracil
  modified_base 241: mod_base = OTHER; note = uracil
  modified_base 247..248: mod_base = OTHER; note = uracil
  modified_base 250: mod_base = OTHER; note = uracil
  modified_base 252: mod_base = OTHER; note = uracil
  modified_base 255: mod_base = OTHER; note = uracil
  modified_base 259..260: mod_base = OTHER; note = uracil
  modified_base 264: mod_base = OTHER; note = uracil
  modified_base 266..267: mod_base = OTHER; note = uracil
  modified_base 270..272: mod_base = OTHER; note = uracil
  modified_base 274..275: mod_base = OTHER; note = uracil
  modified_base 277..278: mod_base = OTHER; note = uracil
  modified_base 283..284: mod_base = OTHER; note = uracil
  modified_base 297: mod_base = OTHER; note = uracil
  modified_base 11: mod_base = m5c
  modified_base 18: mod_base = m5c
  modified_base 54: mod_base = m5c
  modified_base 96: mod_base = m5c
  modified_base 132: mod_base = m5c
  modified_base 188: mod_base = m5c
  variation 150: note = CpG site, residue is C if methylated or T(=U) if unmethylated
aagaaaattacgtatttcgagagggaagttaggttttttttgattttaagtatcgggtgagattagaataggaggattaggtaggtagtgtttggcggtggttttttttttttgtagtaggggagtaaagtcgggggtttttattttggyggggtttgtggttgaggagaggggagtgaagatgggtcggagggagaagtgggattaggttggtggttttgttttttttgggttagtgagtagtggttattttgttggttaggtatttatttttttttaaagtttggagatgagggtaag

SEQ ID NO: 301 - DNA, 300 bp, synthetic construct
  source 1..300: mol_type = other DNA
  modified_base 2..4: mod_base = OTHER; note = uracil
  modified_base 9: mod_base = OTHER; note = uracil
  modified_base 13: mod_base = OTHER; note = uracil
  modified_base 24..26: mod_base = OTHER; note = uracil
  modified_base 28: mod_base = OTHER; note = uracil
  modified_base 30..31: mod_base = OTHER; note = uracil
  modified_base 36: mod_base = OTHER; note = uracil
  modified_base 38: mod_base = OTHER; note = uracil
  modified_base 40: mod_base = OTHER; note = uracil
  modified_base 45: mod_base = OTHER; note = uracil
  modified_base 48: mod_base = OTHER; note = uracil
  modified_base 54: mod_base = OTHER; note = uracil
  modified_base 63: mod_base = OTHER; note = uracil
  modified_base 71..72: mod_base = OTHER; note = uracil
  modified_base 89: mod_base = OTHER; note = uracil
  modified_base 91: mod_base = OTHER; note = uracil
  modified_base 122: mod_base = OTHER; note = uracil
  modified_base 136: mod_base = OTHER; note = uracil
  modified_base 160: mod_base = OTHER; note = uracil
  modified_base 181: mod_base = OTHER; note = uracil
  modified_base 188: mod_base = OTHER; note = uracil
  modified_base 190: mod_base = OTHER; note = uracil
  modified_base 192: mod_base = OTHER; note = uracil
  modified_base 195..196: mod_base = OTHER; note = uracil
  modified_base 201: mod_base = OTHER; note = uracil
  modified_base 204: mod_base = OTHER; note = uracil
  modified_base 206: mod_base = OTHER; note = uracil
  modified_base 230: mod_base = OTHER; note = uracil
  modified_base 235: mod_base = OTHER; note = uracil
  modified_base 243..245: mod_base = OTHER; note = uracil
  modified_base 250..252: mod_base = OTHER; note = uracil
  modified_base 260: mod_base = OTHER; note = uracil
  modified_base 274: mod_base = OTHER; note = uracil
  modified_base 281: mod_base = OTHER; note = uracil
  modified_base 283: mod_base = OTHER; note = uracil
  modified_base 288: mod_base = OTHER; note = uracil
  modified_base 16: mod_base = m5c
  modified_base 22: mod_base = m5c
  modified_base 61: mod_base = m5c
  modified_base 64: mod_base = m5c
  modified_base 67: mod_base = m5c
  modified_base 113: mod_base = m5c
  modified_base 116: mod_base = m5c
  modified_base 123: mod_base = m5c
  modified_base 137: mod_base = m5c
  modified_base 155: mod_base = m5c
  modified_base 163: mod_base = m5c
  modified_base 208: mod_base = m5c
  modified_base 211: mod_base = m5c
  modified_base 231: mod_base = m5c
  modified_base 236: mod_base = m5c
  modified_base 240: mod_base = m5c
  modified_base 248: mod_base = m5c
  modified_base 253: mod_base = m5c
  modified_base 271: mod_base = m5c
  modified_base 279: mod_base = m5c
  modified_base 289: mod_base = m5c
  modified_base 291: mod_base = m5c
  variation 151: note = CpG site, residue is C if methylated or T(=U) if unmethylated
gtttagattaggtagcggggtcgttttttttaggatttttaaggtagttaaggttggaggcgtcggcgagtttggagagggaggagtttattaaattgtgttggatggaaggcgtcgaggatcggaggaattaattcgatgtggggaaggyggacggggttacgaggaaaaaagagggggtaatgtatatttagtttttttattattcggcggggagatggatggtttttcggatcgggcgttttagcgtttcggttagttatagggagacgttagagcgttttggttcgcgatagaaga

SEQ ID NO: 302 - DNA, 300 bp, synthetic construct
  source 1..300: mol_type = other DNA
  modified_base 2: mod_base = OTHER; note = uracil
  modified_base 5: mod_base = OTHER; note = uracil
  modified_base 15..16: mod_base = OTHER; note = uracil
  modified_base 23: mod_base = OTHER; note = uracil
  modified_base 25: mod_base = OTHER; note = uracil
  modified_base 32: mod_base = OTHER; note = uracil
  modified_base 34..36: mod_base = OTHER; note = uracil
  modified_base 42: mod_base = OTHER; note = uracil
  modified_base 46: mod_base = OTHER; note = uracil
  modified_base 54: mod_base = OTHER; note = uracil
  modified_base 62..63: mod_base = OTHER; note = uracil
  modified_base 68: mod_base = OTHER; note = uracil
  modified_base 76..77: mod_base = OTHER; note = uracil
  modified_base 80..81: mod_base = OTHER; note = uracil
  modified_base 84: mod_base = OTHER; note = uracil
  modified_base 86..88: mod_base = OTHER; note = uracil
  modified_base 91: mod_base = OTHER; note = uracil
  modified_base 107: mod_base = OTHER; note = uracil
  modified_base 116: mod_base = OTHER; note = uracil
  modified_base 121..125: mod_base = OTHER; note = uracil
  modified_base 127: mod_base = OTHER; note = uracil
  modified_base 134..135: mod_base = OTHER; note = uracil
  modified_base 142..144: mod_base = OTHER; note = uracil
  modified_base 148: mod_base = OTHER; note = uracil
  modified_base 151..152: mod_base = OTHER; note = uracil
  modified_base 155..158: mod_base = OTHER; note = uracil
  modified_base 160: mod_base = OTHER; note = uracil
  modified_base 173..174: mod_base = OTHER; note = uracil
  modified_base 176: mod_base = OTHER; note = uracil
  modified_base 181..182: mod_base = OTHER; note = uracil
  modified_base 189..190: mod_base = OTHER; note = uracil
  modified_base 193..194: mod_base = OTHER; note = uracil
  modified_base 197..198: mod_base = OTHER; note = uracil
  modified_base 201: mod_base = OTHER; note = uracil
  modified_base 203: mod_base = OTHER; note = uracil
  modified_base 215: mod_base = OTHER; note = uracil
  modified_base 217..218: mod_base = OTHER; note = uracil
  modified_base 220..222: mod_base = OTHER; note = uracil
  modified_base 224: mod_base = OTHER; note = uracil
  modified_base 226..227: mod_base = OTHER; note = uracil
  modified_base 231: mod_base = OTHER; note = uracil
  modified_base 235: mod_base = OTHER; note = uracil
  modified_base 241..242: mod_base = OTHER; note = uracil
  modified_base 244..245: mod_base = OTHER; note = uracil
  modified_base 248..249: mod_base = OTHER; note = uracil
  modified_base 254: mod_base = OTHER; note = uracil
  modified_base 257..258: mod_base = OTHER; note = uracil
  modified_base 267..268: mod_base = OTHER; note = uracil
  modified_base 281..283: mod_base = OTHER; note = uracil
  modified_base 286: mod_base = OTHER; note = uracil
  modified_base 289..290: mod_base = OTHER; note = uracil
  modified_base 295: mod_base = OTHER; note = uracil
  modified_base 300: mod_base = OTHER; note = uracil
  modified_base 9: mod_base = m5c
  modified_base 11: mod_base = m5c
  modified_base 21: mod_base = m5c
  modified_base 29: mod_base = m5c
  modified_base 47: mod_base = m5c
  modified_base 52: mod_base = m5c
  modified_base 60: mod_base = m5c
  modified_base 64: mod_base = m5c
  modified_base 69: mod_base = m5c
  modified_base 89: mod_base = m5c
  modified_base 92: mod_base = m5c
  modified_base 137: mod_base = m5c
  modified_base 145: mod_base = m5c
  modified_base 163: mod_base = m5c
  modified_base 177: mod_base = m5c
  modified_base 184: mod_base = m5c
  modified_base 187: mod_base = m5c
  modified_base 233: mod_base = m5c
  modified_base 236: mod_base = m5c
  modified_base 239: mod_base = m5c
  modified_base 278: mod_base = m5c
  modified_base 284: mod_base = m5c
  variation 149: note = CpG site, residue is C if methylated or T(=U) if unmethylated
ttttttatcgcggattagagcgttttgacgtttttttatagttaatcggggcgttgggacgttcggttcggaaaattatttattttttcgtcgagtgatgaaaaggttgagtgtatattgttttttttttttttttcgtagtttcgttygttttttttatatcggattaattttttcggttttcgacgttttttatttaatataatttagtgaatttttttttttttaggttcgtcggcgtttttagttttagttgttttgagagttttggagagggcgatttcgttgtttgatttgggt

SEQ ID NO: 303 - DNA, 300 bp, synthetic construct
  source 1..300: mol_type = other DNA
  modified_base 7: mod_base = OTHER; note = uracil
  modified_base 13: mod_base = OTHER; note = uracil
  modified_base 33: mod_base = OTHER; note = uracil
  modified_base 35: mod_base = OTHER; note = uracil
  modified_base 39: mod_base = OTHER; note = uracil
  modified_base 41: mod_base = OTHER; note = uracil
  modified_base 43: mod_base = OTHER; note = uracil
  modified_base 81: mod_base = OTHER; note = uracil
  modified_base 89: mod_base = OTHER; note = uracil
  modified_base 114..115: mod_base = OTHER; note = uracil
  modified_base 123: mod_base = OTHER; note = uracil
  modified_base 125..126: mod_base = OTHER; note = uracil
  modified_base 129..132: mod_base = OTHER; note = uracil
  modified_base 139: mod_base = OTHER; note = uracil
  modified_base 146..148: mod_base = OTHER; note = uracil
  modified_base 152..153: mod_base = OTHER; note = uracil
  modified_base 155..157: mod_base = OTHER; note = uracil
  modified_base 159: mod_base = OTHER; note = uracil
  modified_base 162..163: mod_base = OTHER; note = uracil
  modified_base 169: mod_base = OTHER; note = uracil
  modified_base 171: mod_base = OTHER; note = uracil
  modified_base 173: mod_base = OTHER; note = uracil
  modified_base 177: mod_base = OTHER; note = uracil
  modified_base 179: mod_base = OTHER; note = uracil
  modified_base 197: mod_base = OTHER; note = uracil
  modified_base 199: mod_base = OTHER; note = uracil
  modified_base 207: mod_base = OTHER; note = uracil
  modified_base 211: mod_base = OTHER; note = uracil
  modified_base 214: mod_base = OTHER; note = uracil
  modified_base 216: mod_base = OTHER; note = uracil
  modified_base 224: mod_base = OTHER; note = uracil
  modified_base 227: mod_base = OTHER; note = uracil
  modified_base 245: mod_base = OTHER; note = uracil
  modified_base 263: mod_base = OTHER; note = uracil
  modified_base 272: mod_base = OTHER; note = uracil
  modified_base 274..275: mod_base = OTHER; note = uracil
  modified_base 284: mod_base = OTHER; note = uracil
  modified_base 296..298: mod_base = OTHER; note = uracil
  modified_base 59: mod_base = m5c
  modified_base 70: mod_base = m5c
  modified_base 110: mod_base = m5c
  modified_base 119: mod_base = m5c
  modified_base 140: mod_base = m5c
  modified_base 144: mod_base = m5c
  modified_base 165: mod_base = m5c
  modified_base 246: mod_base = m5c
  modified_base 290: mod_base = m5c
  variation 150: note = CpG site, residue is C if methylated or T(=U) if unmethylated
atttggtttgattttatttttaatattttttatattttttttttaaagaaaaaaaaggcgagtgaatatcgtgatgggtgtagttatgttgaataattggatgggaggacgtgttaggcgatttttagtttttgggagtcggacgtttaygtttttttttgtttcgtttttatagatatatttgtggggtgattaatttaggaatttatgttgtttaaagtaattatagtggtgagtgttttgatcggtttgatgtagaaattaaggaaaatattagaaaaattaggggcggaggtttaa

SEQ ID NO: 304 - DNA, 300 bp, synthetic construct
  source 1..300: mol_type = other DNA
  modified_base 6..7: mod_base = OTHER; note = uracil
  modified_base 9: mod_base = OTHER; note = uracil
  modified_base 12..15: mod_base = OTHER; note = uracil
  modified_base 24: mod_base = OTHER; note = uracil
  modified_base 34..35: mod_base = OTHER; note = uracil
  modified_base 43: mod_base = OTHER; note = uracil
  modified_base 46: mod_base = OTHER; note = uracil
  modified_base 49: mod_base = OTHER; note = uracil
  modified_base 53: mod_base = OTHER; note = uracil
  modified_base 58: mod_base = OTHER; note = uracil
  modified_base 63: mod_base = OTHER; note = uracil
  modified_base 65: mod_base = OTHER; note = uracil
  modified_base 67: mod_base = OTHER; note = uracil
  modified_base 69..70: mod_base = OTHER; note = uracil
  modified_base 72: mod_base = OTHER; note = uracil
  modified_base 81: mod_base = OTHER; note = uracil
  modified_base 88: mod_base = OTHER; note = uracil
  modified_base 91: mod_base = OTHER; note = uracil
  modified_base 99..100: mod_base = OTHER; note = uracil
  modified_base 110: mod_base = OTHER; note = uracil
  modified_base 112..115: mod_base = OTHER; note = uracil
  modified_base 117: mod_base = OTHER; note = uracil
  modified_base 126: mod_base = OTHER; note = uracil
  modified_base 140: mod_base = OTHER; note = uracil
  modified_base 159: mod_base = OTHER; note = uracil
  modified_base 163: mod_base = OTHER; note = uracil
  modified_base 165..167: mod_base = OTHER; note = uracil
  modified_base 173: mod_base = OTHER; note = uracil
  modified_base 183..184: mod_base = OTHER; note = uracil
  modified_base 188: mod_base = OTHER; note = uracil
  modified_base 193..194: mod_base = OTHER; note = uracil
  modified_base 196..198: mod_base = OTHER; note = uracil
  modified_base 201..202: mod_base = OTHER; note = uracil
  modified_base 210: mod_base = OTHER; note = uracil
  modified_base 213: mod_base = OTHER; note = uracil
  modified_base 218: mod_base = OTHER; note = uracil
  modified_base 221: mod_base = OTHER; note = uracil
  modified_base 223..225: mod_base = OTHER; note = uracil
  modified_base 228: mod_base = OTHER; note = uracil
  modified_base 237: mod_base = OTHER; note = uracil
  modified_base 239: mod_base = OTHER; note = uracil
  modified_base 243..244: mod_base = OTHER; note = uracil
  modified_base 253: mod_base = OTHER; note = uracil
  modified_base 291: mod_base = OTHER; note = uracil
  modified_base 295..296: mod_base = OTHER; note = uracil
  modified_base 10: mod_base = m5c
  modified_base 54: mod_base = m5c
  modified_base 135: mod_base = m5c
  modified_base 156: mod_base = m5c
  modified_base 160: mod_base = m5c
  modified_base 181: mod_base = m5c
  modified_base 190: mod_base = m5c
  modified_base 230: mod_base = m5c
  modified_base 241: mod_base = m5c
  variation 150: note = CpG site, residue is C if methylated or T(=U) if unmethylated
ttgggttttcgtttttgatttttttggtgttttttttgatttttatattaaatcggttaaaatatttattattgtagttattttgagtagtatgaatttttgagttaattattttataaatgtgtttgtgagaacgaggtagagggaggygtgggcgttcggtttttaggggttggagatcgtttggtacgtttttttatttaattatttagtataattgtatttattacgatatttattcgttttttttttttttagagagaaagtgtaaaaaatattaaaaataagattaagttaaat

SEQ ID NO: 305 - DNA, 300 bp, synthetic construct
  source 1..300: mol_type = other DNA
  modified_base 4: mod_base = OTHER; note = uracil
  modified_base 10: mod_base = OTHER; note = uracil
  modified_base 15: mod_base = OTHER; note = uracil
  modified_base 17: mod_base = OTHER; note = uracil
  modified_base 19: mod_base = OTHER; note = uracil
  modified_base 28: mod_base = OTHER; note = uracil
  modified_base 43: mod_base = OTHER; note = uracil
  modified_base 46: mod_base = OTHER; note = uracil
  modified_base 51: mod_base = OTHER; note = uracil
  modified_base 56: mod_base = OTHER; note = uracil
  modified_base 58: mod_base = OTHER; note = uracil
  modified_base 72..75: mod_base = OTHER; note = uracil
  modified_base 79: mod_base = OTHER; note = uracil
  modified_base 84: mod_base = OTHER; note = uracil
  modified_base 86: mod_base = OTHER; note = uracil
  modified_base 89..90: mod_base = OTHER; note = uracil
  modified_base 95..97: mod_base = OTHER; note = uracil
  modified_base 99..101: mod_base = OTHER; note = uracil
  modified_base 108: mod_base = OTHER; note = uracil
  modified_base 111: mod_base = OTHER; note = uracil
  modified_base 118: mod_base = OTHER; note = uracil
  modified_base 121..122: mod_base = OTHER; note = uracil
  modified_base 126..128: mod_base = OTHER; note = uracil
  modified_base 130..133: mod_base = OTHER; note = uracil
  modified_base 135: mod_base = OTHER; note = uracil
  modified_base 139: mod_base = OTHER; note = uracil
  modified_base 142: mod_base = OTHER; note = uracil
  modified_base 144..146: mod_base = OTHER; note = uracil
  modified_base 154: mod_base = OTHER; note = uracil
  modified_base 156..157: mod_base = OTHER; note = uracil
  modified_base 161: mod_base = OTHER; note = uracil
  modified_base 165: mod_base = OTHER; note = uracil
  modified_base 168: mod_base = OTHER; note = uracil
  modified_base 171: mod_base = OTHER; note = uracil
  modified_base 178: mod_base = OTHER; note = uracil
  modified_base 180: mod_base = OTHER; note = uracil
  modified_base 187: mod_base = OTHER; note = uracil
  modified_base 190: mod_base = OTHER; note = uracil
  modified_base 192: mod_base = OTHER; note = uracil
  modified_base 202..203: mod_base = OTHER; note = uracil
  modified_base 206: mod_base = OTHER; note = uracil
  modified_base 208: mod_base = OTHER; note = uracil
  modified_base 212: mod_base = OTHER; note = uracil
  modified_base 219: mod_base = OTHER; note = uracil
  modified_base 223..225: mod_base = OTHER; note = uracil
  modified_base 228: mod_base = OTHER; note = uracil
  modified_base 230..231: mod_base = OTHER; note = uracil
  modified_base 234..235: mod_base = OTHER; note = uracil
  modified_base 240: mod_base = OTHER; note = uracil
  modified_base 243..244: mod_base = OTHER; note = uracil
  modified_base 248..252: mod_base = OTHER; note = uracil
  modified_base 254: mod_base = OTHER; note = uracil
  modified_base 262..264: mod_base = OTHER; note = uracil
  modified_base 270: mod_base = OTHER; note = uracil
  modified_base 282: mod_base = OTHER; note = uracil
  modified_base 295: mod_base = OTHER; note = uracil
  modified_base 300: mod_base = OTHER; note = uracil
  modified_base 123: mod_base = m5c
  modified_base 245: mod_base = m5c
  modified_base 289: mod_base = m5c
  modified_base 298: mod_base = m5c
  variation 150: note = CpG site, residue is C if methylated or T(=U) if unmethylated
tgatttttttattttttttaagatgattattaggagtggttttaataaaattgaatatagaattttgagggttttaattatgatttaattagagttttttttgaattttttatgagttagttcggttttttttattgattttattttagygggtatttgttttttttttttttttattattttttgttttttttttggtttttagttttgattgaatttagatttaatattttttaatttttttcggtttttttagggaaatttagaggtaaatttgagtgtagggagcgggggtttcgt

SEQ ID NO: 306 - DNA, 300 bp, synthetic construct
  source 1..300: mol_type = other DNA
  modified_base 7..10: mod_base = OTHER; note = uracil
  modified_base 13: mod_base = OTHER; note = uracil
  modified_base 15..17: mod_base = OTHER; note = uracil
  modified_base 20: mod_base = OTHER; note = uracil
  modified_base 22: mod_base = OTHER; note = uracil
  modified_base 24: mod_base = OTHER; note = uracil
  modified_base 32..33: mod_base = OTHER; note = uracil
  modified_base 35: mod_base = OTHER; note = uracil
  modified_base 43..45: mod_base = OTHER; note = uracil
  modified_base 54: mod_base = OTHER; note = uracil
  modified_base 80: mod_base = OTHER; note = uracil
  modified_base 87: mod_base = OTHER; note = uracil
  modified_base 91: mod_base = OTHER; note = uracil
  modified_base 96: mod_base = OTHER; note = uracil
  modified_base 103..104: mod_base = OTHER; note = uracil
  modified_base 115: mod_base = OTHER; note = uracil
  modified_base 142: mod_base = OTHER; note = uracil
  modified_base 148..149: mod_base = OTHER; note = uracil
  modified_base 152: mod_base = OTHER; note = uracil
  modified_base 164: mod_base = OTHER; note = uracil
  modified_base 176: mod_base = OTHER; note = uracil
  modified_base 181: mod_base = OTHER; note = uracil
  modified_base 185: mod_base = OTHER; note = uracil
  modified_base 187: mod_base = OTHER; note = uracil
  modified_base 198: mod_base = OTHER; note = uracil
  modified_base 207: mod_base = OTHER; note = uracil
  modified_base 209: mod_base = OTHER; note = uracil
  modified_base 219: mod_base = OTHER; note = uracil
  modified_base 230..232: mod_base = OTHER; note = uracil
  modified_base 234: mod_base = OTHER; note = uracil
  modified_base 241: mod_base = OTHER; note = uracil
  modified_base 248: mod_base = OTHER; note = uracil
  modified_base 262..263: mod_base = OTHER; note = uracil
  modified_base 265: mod_base = OTHER; note = uracil
  modified_base 267..268: mod_base = OTHER; note = uracil
  modified_base 276: mod_base = OTHER; note = uracil
  modified_base 279: mod_base = OTHER; note = uracil
  modified_base 299: mod_base = OTHER; note = uracil
  modified_base 2: mod_base = m5c
  modified_base 11: mod_base = m5c
  modified_base 55: mod_base = m5c
  modified_base 177: mod_base = m5c
  variation 150: note = CpG site, residue is C if methylated or T(=U) if unmethylated
gcgaagttttcgttttttgtatttaaatttgtttttgggtttttttgagggggtcgggaagaattggaaggtgttgggtttgaatttagttagagttggaaattaaaagagaagtaaaaagtgataaaagaagaagaaagataggtgttygttagggtgaagttagtggggagggtcgggttgatttatgaagaatttagggagggttttggttgagttatgattggggtttttaaaattttgtgtttagttttgttgaaattatttttaatgattattttgagagaaatgaaaaagtta

SEQ ID NO: 307 - DNA, 300 bp, synthetic construct
  source 1..300: mol_type = other DNA
  modified_base 6: mod_base = OTHER; note = uracil
  modified_base 15..17: mod_base = OTHER; note = uracil
  modified_base 25: mod_base = OTHER; note = uracil
  modified_base 27..29: mod_base = OTHER; note = uracil
  modified_base 34..36: mod_base = OTHER; note = uracil
  modified_base 40..41: mod_base = OTHER; note = uracil
  modified_base 44: mod_base = OTHER; note = uracil
  modified_base 57: mod_base = OTHER; note = uracil
  modified_base 61: mod_base = OTHER; note = uracil
  modified_base 63..64: mod_base = OTHER; note = uracil
  modified_base 67: mod_base = OTHER; note = uracil
  modified_base 72..73: mod_base = OTHER; note = uracil
  modified_base 80..81: mod_base = OTHER; note = uracil
  modified_base 83..84: mod_base = OTHER; note = uracil
  modified_base 87: mod_base = OTHER; note = uracil
  modified_base 90..91: mod_base = OTHER; note = uracil
  modified_base 97: mod_base = OTHER; note = uracil
  modified_base 99..100: mod_base = OTHER; note = uracil
  modified_base 104: mod_base = OTHER; note = uracil
  modified_base 111: mod_base = OTHER; note = uracil
  modified_base 113..114: mod_base = OTHER; note = uracil
  modified_base 119: mod_base = OTHER; note = uracil
  modified_base 126: mod_base = OTHER; note = uracil
  modified_base 131..132: mod_base = OTHER; note = uracil
  modified_base 134: mod_base = OTHER; note = uracil
  modified_base 138: mod_base = OTHER; note = uracil
  modified_base 141: mod_base = OTHER; note = uracil
  modified_base 147: mod_base = OTHER; note = uracil
  modified_base 149: mod_base = OTHER; note = uracil
  modified_base 152..153: mod_base = OTHER; note = uracil
  modified_base 158..159: mod_base = OTHER; note = uracil
  modified_base 162..163: mod_base = OTHER; note = uracil
  modified_base 165: mod_base = OTHER; note = uracil
  modified_base 167..169: mod_base = OTHER; note = uracil
  modified_base 171..172: mod_base = OTHER; note = uracil
  modified_base 180: mod_base = OTHER; note = uracil
  modified_base 186: mod_base = OTHER; note = uracil
  modified_base 189..190: mod_base = OTHER; note = uracil
  modified_base 192..193: mod_base = OTHER; note = uracil
  modified_base 198: mod_base = OTHER; note = uracil
  modified_base 201: mod_base = OTHER; note = uracil
  modified_base 207..208: mod_base = OTHER; note = uracil
  modified_base 213..214: mod_base = OTHER; note = uracil
  modified_base 216: mod_base = OTHER; note = uracil
  modified_base 219..220: mod_base = OTHER; note = uracil
  modified_base 223..225: mod_base = OTHER; note = uracil
  modified_base 228: mod_base = OTHER; note = uracil
  modified_base 239..240: mod_base = OTHER; note = uracil
  modified_base 242: mod_base = OTHER; note = uracil
  modified_base 246..247: mod_base = OTHER; note = uracil
  modified_base 253: mod_base = OTHER; note = uracil
  modified_base 258: mod_base = OTHER; note = uracil
  modified_base 265: mod_base = OTHER; note = uracil
  modified_base 267: mod_base = OTHER; note = uracil
  modified_base 270: mod_base = OTHER; note = uracil
  modified_base 272: mod_base = OTHER; note = uracil
  modified_base 277..278: mod_base = OTHER; note = uracil
  modified_base 281..282: mod_base = OTHER; note = uracil
  modified_base 284: mod_base = OTHER; note = uracil
  modified_base 288: mod_base = OTHER; note = uracil
  modified_base 292: mod_base = OTHER; note = uracil
  modified_base 30: mod_base = m5c
  modified_base 37: mod_base = m5c
  modified_base 42: mod_base = m5c
  modified_base 115: mod_base = m5c
  modified_base 120: mod_base = m5c
  modified_base 135: mod_base = m5c
  modified_base 173: mod_base = m5c
  modified_base 195: mod_base = m5c
  modified_base 262: mod_base = m5c
  variation 150: note = CpG site, residue is C if methylated or T(=U) if unmethylated
ggtgttaggagtggtttaggagagtatttcgtttttcggttcgtaggtggtgtttgttggttttagtagggttaggaggttatttgtagtttggtgttttagattgatgttattcgggtcgagtgttgtgttttcggtaatattgatatygtttggtttaattttatttattcggggaataagattaattttttcggttttttgggttttgtttattgttttttttgtaaaggtgagattttaggttagaagtagggtagacgttttagtttaggattagttataaatagttatggtggt

SEQ ID NO: 308 - DNA, 300 bp, synthetic construct
  source 1..300: mol_type = other DNA
  modified_base 2..3: mod_base = OTHER; note = uracil
  modified_base 5..6: mod_base = OTHER; note = uracil
  modified_base 11: mod_base = OTHER; note = uracil
  modified_base 21: mod_base = OTHER; note = uracil
  modified_base 26..27: mod_base = OTHER; note = uracil
  modified_base 32: mod_base = OTHER; note = uracil
  modified_base 41: mod_base = OTHER; note = uracil
  modified_base 44..46: mod_base = OTHER; note = uracil
  modified_base 49: mod_base = OTHER; note = uracil
  modified_base 52: mod_base = OTHER; note = uracil
  modified_base 56..57: mod_base = OTHER; note = uracil
  modified_base 64: mod_base = OTHER; note = uracil
  modified_base 66: mod_base = OTHER; note = uracil
  modified_base 68..69: mod_base = OTHER; note = uracil
  modified_base 74: mod_base = OTHER; note = uracil
  modified_base 83: mod_base = OTHER; note = uracil
  modified_base 90: mod_base = OTHER; note = uracil
  modified_base 95..97: mod_base = OTHER; note = uracil
  modified_base 104: mod_base = OTHER; note = uracil
  modified_base 118: mod_base = OTHER; note = uracil
  modified_base 124..126: mod_base = OTHER; note = uracil
  modified_base 145..146: mod_base = OTHER; note = uracil
  modified_base 156: mod_base = OTHER; note = uracil
  modified_base 164: mod_base = OTHER; note = uracil
  modified_base 171: mod_base = OTHER; note = uracil
  modified_base 173: mod_base = OTHER; note = uracil
  modified_base 176: mod_base = OTHER; note = uracil
  modified_base 178: mod_base = OTHER; note = uracil
  modified_base 183..184: mod_base = OTHER; note = uracil
  modified_base 192: mod_base = OTHER; note = uracil
  modified_base 195: mod_base = OTHER; note = uracil
  modified_base 199: mod_base = OTHER; note = uracil
  modified_base 205: mod_base = OTHER; note = uracil
  modified_base 207..208: mod_base = OTHER; note = uracil
  modified_base 212: mod_base = OTHER; note = uracil
  modified_base 215: mod_base = OTHER; note = uracil
  modified_base 222..223: mod_base = OTHER; note = uracil
  modified_base 225..226: mod_base = OTHER; note = uracil
  modified_base 230..232: mod_base = OTHER; note = uracil
  modified_base 235: mod_base = OTHER; note = uracil
  modified_base 241..242: mod_base = OTHER; note = uracil
  modified_base 245: mod_base = OTHER; note = uracil
  modified_base 249: mod_base = OTHER; note = uracil
  modified_base 251..252: mod_base = OTHER; note = uracil
  modified_base 254..255: mod_base = OTHER; note = uracil
  modified_base 262: mod_base = OTHER; note = uracil
  modified_base 277: mod_base = OTHER; note = uracil
  modified_base 279: mod_base = OTHER; note = uracil
  modified_base 281..282: mod_base = OTHER; note = uracil
  modified_base 287..288: mod_base = OTHER; note = uracil
  modified_base 290: mod_base = OTHER; note = uracil
  modified_base 292..293: mod_base = OTHER; note = uracil
  modified_base 297: mod_base = OTHER; note = uracil
  modified_base 299..300: mod_base = OTHER; note = uracil
  modified_base 38: mod_base = m5c
  modified_base 105: mod_base = m5c
  modified_base 127: mod_base = m5c
  modified_base 165: mod_base = m5c
  modified_base 180: mod_base = m5c
  modified_base 185: mod_base = m5c
  modified_base 258: mod_base = m5c
  modified_base 263: mod_base = m5c
  modified_base 270: mod_base = m5c
  variation 150: note = CpG site, residue is C if methylated or T(=U) if unmethylated
attattatgattgtttgtggttggttttgagttgagacgtttgttttgtttttggtttgaggttttatttttgtagggaaggtagtggataaggtttaagaagtcgaggaggttgattttgtttttcgggtgggtgaggttggattaggyggtgttaatgttgtcggaggtatagtattcggttcgggtgatattagtttggagtattaggttgtaggtggttttttggttttgttggagttagtaaatattatttgcgggtcggggaacggggtgtttttttgggttatttttgatatt

SEQ ID NO: 309 - DNA, 300 bp, synthetic construct
  source 1..300: mol_type = other DNA
  modified_base 2: mod_base = OTHER; note = uracil
  modified_base 5..7: mod_base = OTHER; note = uracil
  modified_base 9: mod_base = OTHER; note = uracil
  modified_base 12: mod_base = OTHER; note = uracil
  modified_base 14..15: mod_base = OTHER; note = uracil
  modified_base 18..19: mod_base = OTHER; note = uracil
  modified_base 26: mod_base = OTHER; note = uracil
  modified_base 28: mod_base = OTHER; note = uracil
  modified_base 30: mod_base = OTHER; note = uracil
  modified_base 33: mod_base = OTHER; note = uracil
  modified_base 37..39: mod_base = OTHER; note = uracil
  modified_base 55: mod_base = OTHER; note = uracil
  modified_base 61..63: mod_base = OTHER; note = uracil
  modified_base 65: mod_base = OTHER; note = uracil
  modified_base 68: mod_base = OTHER; note = uracil
  modified_base 70..71: mod_base = OTHER; note = uracil
  modified_base 76: mod_base = OTHER; note = uracil
  modified_base 79..80: mod_base = OTHER; note = uracil
  modified_base 82: mod_base = OTHER; note = uracil
  modified_base 88..89: mod_base = OTHER; note = uracil
  modified_base 91: mod_base = OTHER; note = uracil
  modified_base 98: mod_base = OTHER; note = uracil
  modified_base 105: mod_base = OTHER; note = uracil
  modified_base 110..111: mod_base = OTHER; note = uracil
  modified_base 113..114: mod_base = OTHER; note = uracil
  modified_base 117: mod_base = OTHER; note = uracil
  modified_base 121..123: mod_base = OTHER; note = uracil
  modified_base 130..131: mod_base = OTHER; note = uracil
  modified_base 139..140: mod_base = OTHER; note = uracil
  modified_base 142: mod_base = OTHER; note = uracil
  modified_base 147: mod_base = OTHER; note = uracil
  modified_base 153: mod_base = OTHER; note = uracil
  modified_base 155: mod_base = OTHER; note = uracil
  modified_base 164: mod_base = OTHER; note = uracil
  modified_base 167: mod_base = OTHER; note = uracil
  modified_base 177..178: mod_base = OTHER; note = uracil
  modified_base 181..184: mod_base = OTHER; note = uracil
  modified_base 186..187: mod_base = OTHER; note = uracil
  modified_base 190..193: mod_base = OTHER; note = uracil
  modified_base 199..203: mod_base = OTHER; note = uracil
  modified_base 208: mod_base = OTHER; note = uracil
  modified_base 212..213: mod_base = OTHER; note = uracil
  modified_base 215: mod_base = OTHER; note = uracil
  modified_base 217..218: mod_base = OTHER; note = uracil
  modified_base 224..225: mod_base = OTHER; note = uracil
  modified_base 233: mod_base = OTHER; note = uracil
  modified_base 241: mod_base = OTHER; note = uracil
  modified_base 247..248: mod_base = OTHER; note = uracil
  modified_base 253: mod_base = OTHER; note = uracil
  modified_base 255: mod_base = OTHER; note = uracil
  modified_base 257: mod_base = OTHER; note = uracil
  modified_base 260: mod_base = OTHER; note = uracil
  modified_base 263: mod_base = OTHER; note = uracil
  modified_base 272: mod_base = OTHER; note = uracil
  modified_base 275: mod_base = OTHER; note = uracil
  modified_base 277..279: mod_base = OTHER; note = uracil
  modified_base 282: mod_base = OTHER; note = uracil
  modified_base 284..285: mod_base = OTHER; note = uracil
  modified_base 296..297: mod_base = OTHER; note = uracil
  modified_base 300: mod_base = OTHER; note = uracil
  modified_base 85: mod_base = m5c
  modified_base 124: mod_base = m5c
  modified_base 175: mod_base = m5c
  modified_base 231: mod_base = m5c
  modified_base 238: mod_base = m5c
  modified_base 264: mod_base = m5c
  modified_base 290: mod_base = m5c
  variation 134: note = CpG site, residue is C if methylated or T(=U) if unmethylated
  variation 149: note = CpG site, residue is C if methylated or T(=U) if unmethylated
  variation 195: note = CpG site, residue is C if methylated or T(=U) if unmethylated
  variation 205: note = CpG site, residue is C if methylated or T(=U) if unmethylated
gtagttttttttatttgtttggtgatttattataagttttgggggaaggaatggtagtggttttttttatttttattgtttttgcggttataatgggtagttgatataattatttgtaggtttcgggagttatyggggttttttgataygtgtttattagtggtttttgaggagcgtttgttttatttgttttaygtgtttttaygtttggttattttagggtttattagcgttaatcggtaaatgtttgtgtttttatttatcgggaaaatattttttttttttagagcggaggttagt

SEQ ID NO: 310 - DNA, 300 bp, synthetic construct
  source 1..300: mol_type = other DNA
  modified_base 1: mod_base = OTHER; note = uracil
  modified_base 5..6: mod_base = OTHER; note = uracil
  modified_base 8: mod_base = OTHER; note = uracil
  modified_base 11: mod_base = OTHER; note = uracil
  modified_base 13: mod_base = OTHER; note = uracil
  modified_base 33..34: mod_base = OTHER; note = uracil
  modified_base 48: mod_base = OTHER; note = uracil
  modified_base 50: mod_base = OTHER; note = uracil
  modified_base 54: mod_base = OTHER; note = uracil
  modified_base 60: mod_base = OTHER; note = uracil
  modified_base 70: mod_base = OTHER; note = uracil
  modified_base 78..80: mod_base = OTHER; note = uracil
  modified_base 89..90: mod_base = OTHER; note = uracil
  modified_base 102: mod_base = OTHER; note = uracil
  modified_base 111: mod_base = OTHER; note = uracil
  modified_base 120: mod_base = OTHER; note = uracil
  modified_base 126: mod_base = OTHER; note = uracil
  modified_base 128..129: mod_base = OTHER; note = uracil
  modified_base 131: mod_base = OTHER; note = uracil
  modified_base 137..138: mod_base = OTHER; note = uracil
  modified_base 140: mod_base = OTHER; note = uracil
  modified_base 148: mod_base = OTHER; note = uracil
  modified_base 155: mod_base = OTHER; note = uracil
  modified_base 162..164: mod_base = OTHER; note = uracil
  modified_base 171: mod_base = OTHER; note = uracil
  modified_base 173..174: mod_base = OTHER; note = uracil
  modified_base 180..181: mod_base = OTHER; note = uracil
  modified_base 184: mod_base = OTHER; note = uracil
  modified_base 197: mod_base = OTHER; note = uracil
  modified_base 200: mod_base = OTHER; note = uracil
  modified_base 203..205: mod_base = OTHER; note = uracil
  modified_base 213: mod_base = OTHER; note = uracil
  modified_base 216: mod_base = OTHER; note = uracil
  modified_base 222: mod_base = OTHER; note = uracil
  modified_base 240..241: mod_base = OTHER; note = uracil
  modified_base 243: mod_base = OTHER; note = uracil
  modified_base 246..247: mod_base = OTHER; note = uracil
  modified_base 251..252: mod_base = OTHER; note = uracil
  modified_base 255..259: mod_base = OTHER; note = uracil
  modified_base 264: mod_base = OTHER; note = uracil
  modified_base 276: mod_base = OTHER; note = uracil
  modified_base 278..279: mod_base = OTHER; note = uracil
  modified_base 283: mod_base = OTHER; note = uracil
  modified_base 296: mod_base = OTHER; note = uracil
  modified_base 299: mod_base = OTHER; note = uracil
  modified_base 9: mod_base = m5c
  modified_base 35: mod_base = m5c
  modified_base 61: mod_base = m5c
  modified_base 68: mod_base = m5c
  modified_base 124: mod_base = m5c
  modified_base 175: mod_base = m5c
  modified_base 214: mod_base = m5c
  variation 94: note = CpG site, residue is C if methylated or T(=U) if unmethylated
  variation 104: note = CpG site, residue is C if methylated or T(=U) if unmethylated
  variation 150: note = CpG site, residue is C if methylated or T(=U) if unmethylated
  variation 165: note = CpG site, residue is C if methylated or T(=U) if unmethylated
ttggttttcgttttggagaagggagatgttttttcggtagatgagagtataggtatttgtcgattagcgttaatggattttggagtggttagaygtgggggtaygtggggtaggtggggtaggcgttttttagaagttattaatgagtaygtgttaagaggtttygatggttttcggggtttgtaggtggttatgttaattgtttattgtggtcgtagaggtagtaaaggtgaagagggttattgttatttttttttttagggtttgtagtgagttattaggtaggtgaagagggttgtt

SEQ ID NO: 311 - DNA, 300 bp, synthetic construct
  source 1..300: mol_type = other DNA
  modified_base 5..7: mod_base = OTHER; note = uracil
  modified_base 9: mod_base = OTHER; note = uracil
  modified_base 12: mod_base = OTHER; note = uracil
  modified_base 14..15: mod_base = OTHER; note = uracil
  modified_base 20: mod_base = OTHER; note = uracil
  modified_base 23..24: mod_base = OTHER; note = uracil
  modified_base 26: mod_base = OTHER; note = uracil
  modified_base 32..33: mod_base = OTHER; note = uracil
  modified_base 35: mod_base = OTHER; note = uracil
  modified_base 42: mod_base = OTHER; note = uracil
  modified_base 49: mod_base = OTHER; note = uracil
  modified_base 54..55: mod_base = OTHER; note = uracil
  modified_base 57..58: mod_base = OTHER; note = uracil
  modified_base 61: mod_base = OTHER; note = uracil
  modified_base 65..67: mod_base = OTHER; note = uracil
  modified_base 74..75: mod_base = OTHER; note = uracil
  modified_base 83..84: mod_base = OTHER; note = uracil
  modified_base 86: mod_base = OTHER; note = uracil
  modified_base 91: mod_base = OTHER; note = uracil
  modified_base 97: mod_base = OTHER; note = uracil
  modified_base 99: mod_base = OTHER; note = uracil
  modified_base 108: mod_base = OTHER; note = uracil
  modified_base 111: mod_base = OTHER; note = uracil
  modified_base 121..122: mod_base = OTHER; note = uracil
  modified_base 125..128: mod_base = OTHER; note = uracil
  modified_base 130..131: mod_base = OTHER; note = uracil
  modified_base 134..137: mod_base = OTHER; note = uracil
  modified_base 143..147: mod_base = OTHER; note = uracil
  modified_base 152: mod_base = OTHER; note = uracil
  modified_base 156..157: mod_base = OTHER; note = uracil
  modified_base 159: mod_base = OTHER; note = uracil
  modified_base 161..162: mod_base = OTHER; note = uracil
  modified_base 168..169: mod_base = OTHER; note = uracil
  modified_base 177: mod_base = OTHER; note = uracil
  modified_base 185: mod_base = OTHER; note = uracil
  modified_base 191..192: mod_base = OTHER; note = uracil
  modified_base 197: mod_base = OTHER; note = uracil
  modified_base 199: mod_base = OTHER; note = uracil
  modified_base 201: mod_base = OTHER; note = uracil
  modified_base 204: mod_base = OTHER; note = uracil
  modified_base 207: mod_base = OTHER; note = uracil
  modified_base 216: mod_base = OTHER; note = uracil
  modified_base 219: mod_base = OTHER; note = uracil
  modified_base 221..223: mod_base = OTHER; note = uracil
  modified_base 226: mod_base = OTHER; note = uracil
  modified_base 228..229: mod_base = OTHER; note = uracil
  modified_base 240..241: mod_base = OTHER; note = uracil
  modified_base 244..245: mod_base = OTHER; note = uracil
  modified_base 252..253: mod_base = OTHER; note = uracil
  modified_base 257..258: mod_base = OTHER; note = uracil
  modified_base 261: mod_base = OTHER; note = uracil
  modified_base 264..265: mod_base = OTHER; note = uracil
  modified_base 267: mod_base = OTHER; note = uracil
  modified_base 273: mod_base = OTHER; note = uracil
  modified_base 275: mod_base = OTHER; note = uracil
  modified_base 282..283: mod_base = OTHER; note = uracil
  modified_base 290: mod_base = OTHER; note = uracil
  modified_base 295: mod_base = OTHER; note = uracil
  modified_base 300: mod_base = OTHER; note = uracil
  modified_base 29: mod_base = m5c
  modified_base 68: mod_base = m5c
  modified_base 78: mod_base = m5c
  modified_base 119: mod_base = m5c
  modified_base 175: mod_base = m5c
  modified_base 182: mod_base = m5c
  modified_base 208: mod_base = m5c
  modified_base 234: mod_base = m5c
  modified_base 259: mod_base = m5c
  modified_base 268: mod_base = m5c
  modified_base 287: mod_base = m5c
  variation 93: note = CpG site, residue is C if methylated or T(=U) if unmethylated
  variation 139: note = CpG site, residue is C if methylated or T(=U) if unmethylated
  variation 149: note = CpG site, residue is C if methylated or T(=U) if unmethylated
gtggttttttttatttttattgtttttgcggttataatgggtagttgatataattatttgtaggtttcgggagttatcggggttttttgataygtgtttattagtggtttttgaggagcgtttgttttatttgttttaygtgtttttaygtttggttattttagggtttattagcgttaatcggtaaatgtttgtgtttttatttatcgggaaaatattttttttttttagagcggaggttagtttaaaaattaggttcgtagttttcgaggttttgaaaattaagcggttgttttggtt

SEQ ID NO: 312 - DNA, 300 bp, synthetic construct
  source 1..300: mol_type = other DNA
  modified_base 2..3: mod_base = OTHER; note = uracil
  modified_base 8: mod_base = OTHER; note = uracil
  modified_base 11: mod_base = OTHER; note = uracil
  modified_base 14: mod_base = OTHER; note = uracil
  modified_base 23: mod_base = OTHER; note = uracil
  modified_base 28..29: mod_base = OTHER; note = uracil
  modified_base 37: mod_base = OTHER; note = uracil
  modified_base 44..45: mod_base = OTHER; note = uracil
  modified_base 57: mod_base = OTHER; note = uracil
  modified_base 61..62: mod_base = OTHER; note = uracil
  modified_base 64: mod_base = OTHER; note = uracil
  modified_base 67: mod_base = OTHER; note = uracil
  modified_base 69: mod_base = OTHER; note = uracil
  modified_base 89..90: mod_base = OTHER; note = uracil
  modified_base 104: mod_base = OTHER; note = uracil
  modified_base 106: mod_base = OTHER; note = uracil
  modified_base 110: mod_base = OTHER; note = uracil
  modified_base 116: mod_base = OTHER; note = uracil
  modified_base 126: mod_base = OTHER; note = uracil
  modified_base 134..136: mod_base = OTHER; note = uracil
  modified_base 145..146: mod_base = OTHER; note = uracil
  modified_base 158: mod_base = OTHER; note = uracil
  modified_base 167: mod_base = OTHER; note = uracil
  modified_base 176: mod_base = OTHER; note = uracil
  modified_base 182: mod_base = OTHER; note = uracil
  modified_base 184..185: mod_base = OTHER; note = uracil
  modified_base 187: mod_base = OTHER; note = uracil
  modified_base 193..194: mod_base = OTHER; note = uracil
  modified_base 196: mod_base = OTHER; note = uracil
  modified_base 204: mod_base = OTHER; note = uracil
  modified_base 211: mod_base = OTHER; note = uracil
  modified_base 218..220: mod_base = OTHER; note = uracil
  modified_base 227: mod_base = OTHER; note = uracil
  modified_base 229..230: mod_base = OTHER; note = uracil
  modified_base 236..237: mod_base = OTHER; note = uracil
  modified_base 240: mod_base = OTHER; note = uracil
  modified_base 253: mod_base = OTHER; note = uracil
  modified_base 256: mod_base = OTHER; note = uracil
  modified_base 259..261: mod_base = OTHER; note = uracil
  modified_base 269: mod_base = OTHER; note = uracil
  modified_base 272: mod_base = OTHER; note = uracil
  modified_base 278: mod_base = OTHER; note = uracil
  modified_base 296..297: mod_base = OTHER; note = uracil
  modified_base 299: mod_base = OTHER; note = uracil
  modified_base 12: mod_base = m5c
  modified_base 31: mod_base = m5c
  modified_base 40: mod_base = m5c
  modified_base 65: mod_base = m5c
  modified_base 91: mod_base = m5c
  modified_base 117: mod_base = m5c
  modified_base 124: mod_base = m5c
  modified_base 180: mod_base = m5c
  modified_base 221: mod_base = m5c
  modified_base 231: mod_base = m5c
  modified_base 270: mod_base = m5c
  variation 150: note = CpG site, residue is C if methylated or T(=U) if unmethylated
  variation 160: note = CpG site, residue is C if methylated or T(=U) if unmethylated
  variation 206: note = CpG site, residue is C if methylated or T(=U) if unmethylated
attagaatagtcgtttggtttttagagtttcggaggttgcgggtttggtttttaggttggttttcgttttggagaagggagatgttttttcggtagatgagagtataggtatttgtcgattagcgttaatggattttggagtggttagaygtgggggtaygtggggtaggtggggtaggcgttttttagaagttattaatgagtaygtgttaagaggtttcgatggttttcggggtttgtaggtggttatgttaattgtttattgtggtcgtagaggtagtaaaggtgaagagggttatt

SEQ ID NO: 313 - DNA, 300 bp, synthetic construct
  source 1..300: mol_type = other DNA
  modified_base 6..8: mod_base = OTHER; note = uracil
  modified_base 14: mod_base = OTHER; note = uracil
  modified_base 17: mod_base = OTHER; note = uracil
  modified_base 20..21: mod_base = OTHER; note = uracil
  modified_base 23: mod_base = OTHER; note = uracil
  modified_base 29: mod_base = OTHER; note = uracil
  modified_base 32: mod_base = OTHER; note = uracil
  modified_base 38: mod_base = OTHER; note = uracil
  modified_base 41: mod_base = OTHER; note = uracil
  modified_base 44: mod_base = OTHER; note = uracil
  modified_base 49: mod_base = OTHER; note = uracil
  modified_base 54: mod_base = OTHER; note = uracil
  modified_base 59..61: mod_base = OTHER; note = uracil
  modified_base 67: mod_base = OTHER; note = uracil
  modified_base 69: mod_base = OTHER; note = uracil
  modified_base 72: mod_base = OTHER; note = uracil
  modified_base 75..76: mod_base = OTHER; note = uracil
  modified_base 79: mod_base = OTHER; note = uracil
  modified_base 85: mod_base = OTHER; note = uracil
  modified_base 87..89: mod_base = OTHER; note = uracil
  modified_base 91: mod_base = OTHER; note = uracil
  modified_base 93: mod_base = OTHER; note = uracil
  modified_base 99: mod_base = OTHER; note = uracil
  modified_base 103: mod_base = OTHER; note = uracil
  modified_base 113: mod_base = OTHER; note = uracil
  modified_base 115: mod_base = OTHER; note = uracil
  modified_base 118: mod_base = OTHER; note = uracil
  modified_base 122..125: mod_base = OTHER; note = uracil
  modified_base 127..128: mod_base = OTHER; note = uracil
  modified_base 131: mod_base = OTHER; note = uracil
  modified_base 133..134: mod_base = OTHER; note = uracil
  modified_base 137..139: mod_base = OTHER; note = uracil
  modified_base 143..145: mod_base = OTHER; note = uracil
  modified_base 156: mod_base = OTHER; note = uracil
  modified_base 158..159: mod_base = OTHER; note = uracil
  modified_base 161..162: mod_base = OTHER; note = uracil
  modified_base 164..165: mod_base = OTHER; note = uracil
  modified_base 174: mod_base = OTHER; note = uracil
  modified_base 180..181: mod_base = OTHER; note = uracil
  modified_base 183: mod_base = OTHER; note = uracil
  modified_base 186: mod_base = OTHER; note = uracil
  modified_base 188: mod_base = OTHER; note = uracil
  modified_base 192..193: mod_base = OTHER; note = uracil
  modified_base 200: mod_base = OTHER; note = uracil
  modified_base 210: mod_base = OTHER; note = uracil
  modified_base 212: mod_base = OTHER; note = uracil
  modified_base 215: mod_base = OTHER; note = uracil
  modified_base 220..221: mod_base = OTHER; note = uracil
  modified_base 226: mod_base = OTHER; note = uracil
  modified_base 237..238: mod_base = OTHER; note = uracil
  modified_base 244: mod_base = OTHER; note = uracil
  modified_base 247..248: mod_base = OTHER; note = uracil
  modified_base 259..263: mod_base = OTHER; note = uracil
  modified_base 265: mod_base = OTHER; note = uracil
  modified_base 267..269: mod_base = OTHER; note = uracil
  modified_base 271: mod_base = OTHER; note = uracil
  modified_base 273..275: mod_base = OTHER; note = uracil
  modified_base 277..278: mod_base = OTHER; note = uracil
  modified_base 283: mod_base = OTHER; note = uracil
  modified_base 285..287: mod_base = OTHER; note = uracil
  modified_base 289: mod_base = OTHER; note = uracil
  modified_base 292: mod_base = OTHER; note = uracil
  modified_base 294: mod_base = OTHER; note = uracil
  modified_base 296: mod_base = OTHER; note = uracil
  modified_base 298..300: mod_base = OTHER; note = uracil
  modified_base 15: mod_base = m5c
  modified_base 18: mod_base = m5c
  modified_base 45: mod_base = m5c
  modified_base 55: mod_base = m5c
  modified_base 65: mod_base = m5c
  modified_base 110: mod_base = m5c
  modified_base 119: mod_base = m5c
  modified_base 166: mod_base = m5c
  modified_base 281: mod_base = m5c
  variation 150: note = CpG site, residue is C if methylated or T(=U) if unmethylated
atgggttttggggtcgtcgttttagtgttttttggtgttgtagtcgggtagggtcgaattttggcgtatagttttttgttgagtttttttttttaaggttgtttgtgggcggttttgtcggttttttttgtatttgtttaggttttgggyggaggttttttttttcgggggggttgtggttttagtatagattaggggatagaaggtggttttttttggttttggttgggtgtgaattaaagattttttgtaagaaatttttttttttttttttttttttcgtttttttatttttttttt

SEQ ID NO: 314 - DNA, 300 bp, synthetic construct
  source 1..300: mol_type = other DNA
  modified_base 47: mod_base = OTHER; note = uracil
  modified_base 51: mod_base = OTHER; note = uracil
  modified_base 59: mod_base = OTHER; note = uracil
  modified_base 67: mod_base = OTHER; note = uracil
  modified_base 69: mod_base = OTHER; note = uracil
  modified_base 71..73: mod_base = OTHER; note = uracil
  modified_base 76..77: mod_base = OTHER; note = uracil
  modified_base 82..83: mod_base = OTHER; note = uracil
  modified_base 92..93: mod_base = OTHER; note = uracil
  modified_base 95..96: mod_base = OTHER; note = uracil
  modified_base 99: mod_base = OTHER; note = uracil
  modified_base 103..106: mod_base = OTHER; note = uracil
  modified_base 111: mod_base = OTHER; note = uracil
  modified_base 116: mod_base = OTHER; note = uracil
  modified_base 122..123: mod_base = OTHER; note = uracil
  modified_base 125: mod_base = OTHER; note = uracil
  modified_base 128..133: mod_base = OTHER; note = uracil
  modified_base 146..147: mod_base = OTHER; note = uracil
  modified_base 149: mod_base = OTHER; note = uracil
  modified_base 152..154: mod_base = OTHER; note = uracil
  modified_base 159..160: mod_base = OTHER; note = uracil
  modified_base 165: mod_base = OTHER; note = uracil
  modified_base 171: mod_base = OTHER; note = uracil
  modified_base 180: mod_base = OTHER; note = uracil
  modified_base 184: mod_base = OTHER; note = uracil
  modified_base 189: mod_base = OTHER; note = uracil
  modified_base 192..194: mod_base = OTHER; note = uracil
  modified_base 196: mod_base = OTHER; note = uracil
  modified_base 200: mod_base = OTHER; note = uracil
  modified_base 203..204: mod_base = OTHER; note = uracil
  modified_base 218: mod_base = OTHER; note = uracil
  modified_base 220: mod_base = OTHER; note = uracil
  modified_base 223: mod_base = OTHER; note = uracil
  modified_base 230: mod_base = OTHER; note = uracil
  modified_base 237..238: mod_base = OTHER; note = uracil
  modified_base 248..250: mod_base = OTHER; note = uracil
  modified_base 253..254: mod_base = OTHER; note = uracil
  modified_base 258: mod_base = OTHER; note = uracil
  modified_base 261: mod_base = OTHER; note = uracil
  modified_base 264: mod_base = OTHER; note = uracil
  modified_base 266..267: mod_base = OTHER; note = uracil
  modified_base 274: mod_base = OTHER; note = uracil
  modified_base 276: mod_base = OTHER; note = uracil
  modified_base 288..291: mod_base = OTHER; note = uracil
  modified_base 296..298: mod_base = OTHER; note = uracil
  modified_base 19: mod_base = m5c
  modified_base 134: mod_base = m5c
  modified_base 181: mod_base = m5c
  modified_base 190: mod_base = m5c
  modified_base 235: mod_base = m5c
  modified_base 245: mod_base = m5c
  modified_base 255: mod_base = m5c
  modified_base 282: mod_base = m5c
  modified_base 285: mod_base = m5c
  variation 150: note = CpG site, residue is C if methylated or T(=U) if unmethylated
gggagagagatgagggagcgaaggagggagagggagagggggattttttataggaagtttttggtttatatttagttaaggttaagaagagttattttttgttttttggtttgtgttgaggttatagttttttcgggaggaggagttttygtttagggtttgggtaggtgtaggaggggtcggtagagtcgtttatagatagttttagagagggagatttagtaggaagttgtgcgttagggttcggttttgttcggttgtagtattagaagatattgaggcggcggttttagggtttat

SEQ ID NO: 315 - DNA, 300 bp, synthetic construct
  source 1..300: mol_type = other DNA
  modified_base 1: mod_base = OTHER; note = uracil
  modified_base 3: mod_base = OTHER; note = uracil
  modified_base 8..9: mod_base = OTHER; note = uracil
  modified_base 12..13: mod_base = OTHER; note = uracil
  modified_base 15: mod_base = OTHER; note = uracil
  modified_base 17: mod_base = OTHER; note = uracil
  modified_base 20: mod_base = OTHER; note = uracil
  modified_base 31: mod_base = OTHER; note = uracil
  modified_base 46: mod_base = OTHER; note = uracil
  modified_base 53..55: mod_base = OTHER; note = uracil
  modified_base 59: mod_base = OTHER; note = uracil
  modified_base 61: mod_base = OTHER; note = uracil
  modified_base 66: mod_base = OTHER; note = uracil
  modified_base 73: mod_base = OTHER; note = uracil
  modified_base 78: mod_base = OTHER; note = uracil
  modified_base 89: mod_base = OTHER; note = uracil
  modified_base 92: mod_base = OTHER; note = uracil
  modified_base 95: mod_base = OTHER; note = uracil
  modified_base 100: mod_base = OTHER; note = uracil
  modified_base 103: mod_base = OTHER; note = uracil
  modified_base 107: mod_base = OTHER; note = uracil
  modified_base 114: mod_base = OTHER; note = uracil
  modified_base 120..121: mod_base = OTHER; note = uracil
  modified_base 124: mod_base = OTHER; note = uracil
  modified_base 131: mod_base = OTHER; note = uracil
  modified_base 147..149: mod_base = OTHER; note = uracil
  modified_base 155: mod_base = OTHER; note = uracil
  modified_base 157: mod_base = OTHER; note = uracil
  modified_base 159: mod_base = OTHER; note = uracil
  modified_base 161: mod_base = OTHER; note = uracil
  modified_base 163..165: mod_base = OTHER; note = uracil
  modified_base 172: mod_base = OTHER; note = uracil
  modified_base 176..178: mod_base = OTHER; note = uracil
  modified_base 181: mod_base = OTHER; note = uracil
  modified_base 183..185: mod_base = OTHER; note = uracil
  modified_base 187: mod_base = OTHER; note = uracil
  modified_base 193..195: mod_base = OTHER; note = uracil
  modified_base 197: mod_base = OTHER; note = uracil
  modified_base 209: mod_base = OTHER; note = uracil
  modified_base 218..219: mod_base = OTHER; note = uracil
  modified_base 222: mod_base = OTHER; note = uracil
  modified_base 227: mod_base = OTHER; note = uracil
  modified_base 241: mod_base = OTHER; note = uracil
  modified_base 247: mod_base = OTHER; note = uracil
  modified_base 253: mod_base = OTHER; note = uracil
  modified_base 258: mod_base = OTHER; note = uracil
  modified_base 264: mod_base = OTHER; note = uracil
  modified_base 267..269: mod_base = OTHER; note = uracil
  modified_base 276: mod_base = OTHER; note = uracil
  modified_base 278..279: mod_base = OTHER; note = uracil
  modified_base 287: mod_base = OTHER; note = uracil
  modified_base 48: mod_base = m5c
  modified_base 56: mod_base = m5c
  modified_base 105: mod_base = m5c
  modified_base 112: mod_base = m5c
  modified_base 115: mod_base = m5c
  modified_base 150: mod_base = m5c
  modified_base 167: mod_base = m5c
  modified_base 173: mod_base = m5c
  modified_base 190: mod_base = m5c
  modified_base 206: mod_base = m5c
  modified_base 229: mod_base = m5c
  modified_base 249: mod_base = m5c
  modified_base 298: mod_base = m5c
  variation 135: note = CpG site, residue is C if methylated or T(=U) if unmethylated
  variation 142: note = CpG site, residue is C if methylated or T(=U) if unmethylated
  variation 170: note = CpG site, residue is C if methylated or T(=U) if unmethylated
tattggattatttatataatttttgaggattagtggaaatgaaaatacggtgtttcggtataaaatatattttatagtttgggttaggtaatagtaaagtattacgttgagcgtcgggattttttgagtgtaggyggtgggygaagtttcgagttatatatatttacgaygtcggttttgtttttatagcggttttttggggtagcgattggtattatttgtattttacgagggaggaaattgaggtacgaattgtttagaagttgttttgaggttattaagtgagttaggaagaggcgt

SEQ ID NO: 316 - DNA, 300 bp, synthetic construct
  source 1..300: mol_type = other DNA
  modified_base 3..4: mod_base = OTHER; note = uracil
  modified_base 6: mod_base = OTHER; note = uracil
  modified_base 9..10: mod_base = OTHER; note = uracil
  modified_base 14: mod_base = OTHER; note = uracil
  modified_base 16: mod_base = OTHER; note = uracil
  modified_base 18: mod_base = OTHER; note = uracil
  modified_base 26..27: mod_base = OTHER; note = uracil
  modified_base 29: mod_base = OTHER; note = uracil
  modified_base 34: mod_base = OTHER; note = uracil
  modified_base 37: mod_base = OTHER; note = uracil
  modified_base 40: mod_base = OTHER; note = uracil
  modified_base 45: mod_base = OTHER; note = uracil
  modified_base 54..55: mod_base = OTHER; note = uracil
  modified_base 57: mod_base = OTHER; note = uracil
  modified_base 63..64: mod_base = OTHER; note = uracil
  modified_base 66..68: mod_base = OTHER; note = uracil
  modified_base 79: mod_base = OTHER; note = uracil
  modified_base 88..89: mod_base = OTHER; note = uracil
  modified_base 95: mod_base = OTHER; note = uracil
  modified_base 98..101: mod_base = OTHER; note = uracil
  modified_base 108: mod_base = OTHER; note = uracil
  modified_base 111: mod_base = OTHER; note = uracil
  modified_base 120: mod_base = OTHER; note = uracil
  modified_base 125: mod_base = OTHER; note = uracil
  modified_base 147: mod_base = OTHER; note = uracil
  modified_base 154: mod_base = OTHER; note = uracil
  modified_base 159..161: mod_base = OTHER; note = uracil
  modified_base 163: mod_base = OTHER; note = uracil
  modified_base 166..167: mod_base = OTHER; note = uracil
  modified_base 170: mod_base = OTHER; note = uracil
  modified_base 172: mod_base = OTHER; note = uracil
  modified_base 174: mod_base = OTHER; note = uracil
  modified_base 182..183: mod_base = OTHER; note = uracil
  modified_base 189: mod_base = OTHER; note = uracil
  modified_base 191: mod_base = OTHER; note = uracil
  modified_base 201: mod_base = OTHER; note = uracil
  modified_base 206: mod_base = OTHER; note = uracil
  modified_base 212..213: mod_base = OTHER; note = uracil
  modified_base 217..219: mod_base = OTHER; note = uracil
  modified_base 223: mod_base = OTHER; note = uracil
  modified_base 242: mod_base = OTHER; note = uracil
  modified_base 248: mod_base = OTHER; note = uracil
  modified_base 250: mod_base = OTHER; note = uracil
  modified_base 259: mod_base = OTHER; note = uracil
  modified_base 264..265: mod_base = OTHER; note = uracil
  modified_base 267: mod_base = OTHER; note = uracil
  modified_base 272..273: mod_base = OTHER; note = uracil
  modified_base 275: mod_base = OTHER; note = uracil
  modified_base 294..295: mod_base = OTHER; note = uracil
  modified_base 1: mod_base = m5c
  modified_base 50: mod_base = m5c
  modified_base 70: mod_base = m5c
  modified_base 93: mod_base = m5c
  modified_base 109: mod_base = m5c
  modified_base 126: mod_base = m5c
  modified_base 132: mod_base = m5c
  modified_base 149: mod_base = m5c
  modified_base 184: mod_base = m5c
  modified_base 187: mod_base = m5c
  modified_base 194: mod_base = m5c
  modified_base 243: mod_base = m5c
  modified_base 251: mod_base = m5c
  variation 129: note = CpG site, residue is C if methylated or T(=U) if unmethylated
  variation 157: note = CpG site, residue is C if methylated or T(=U) if unmethylated
  variation 164: note = CpG site, residue is C if methylated or T(=U) if unmethylated
cgtttttttttagtttatttggtgattttagggtagtttttgaatagttcgtgttttagttttttttttcgtgaaatgtaggtaatattagtcgttattttagagggtcgttgtgggagtagggtcggygtcgtgggtgtgtgtgattcggggtttygtttatygtttgtatttagaaggtttcggcgtttagcgtgatgttttgttgttgtttaatttaagttatgaaatatgttttgtgtcggggtatcgtgtttttatttttattgatttttaaaagttgtgtggatggtttagtgt

SEQ ID NO: 317 - DNA, 300 bp, synthetic construct
  source 1..300: mol_type = other DNA
  modified_base 1: mod_base = OTHER; note = uracil
  modified_base 3..4: mod_base = OTHER; note = uracil
  modified_base 11..12: mod_base = OTHER; note = uracil
  modified_base 14: mod_base = OTHER; note = uracil
  modified_base 26: mod_base = OTHER; note = uracil
  modified_base 40..41: mod_base = OTHER; note = uracil
  modified_base 45..46: mod_base = OTHER; note = uracil
  modified_base 51: mod_base = OTHER; note = uracil
  modified_base 59..61: mod_base = OTHER; note = uracil
  modified_base 66: mod_base = OTHER; note = uracil
  modified_base 74: mod_base = OTHER; note = uracil
  modified_base 76: mod_base = OTHER; note = uracil
  modified_base 78..79: mod_base = OTHER; note = uracil
  modified_base 83: mod_base = OTHER; note = uracil
  modified_base 104: mod_base = OTHER; note = uracil
  modified_base 110: mod_base = OTHER; note = uracil
  modified_base 112: mod_base = OTHER; note = uracil
  modified_base 118..121: mod_base = OTHER; note = uracil
  modified_base 127: mod_base = OTHER; note = uracil
  modified_base 130..132: mod_base = OTHER; note = uracil
  modified_base 135: mod_base = OTHER; note = uracil
  modified_base 138..139: mod_base = OTHER; note = uracil
  modified_base 141: mod_base = OTHER; note = uracil
  modified_base 148: mod_base = OTHER; note = uracil
  modified_base 159: mod_base = OTHER; note = uracil
  modified_base 167: mod_base = OTHER; note = uracil
  modified_base 171..172: mod_base = OTHER; note = uracil
  modified_base 176..177: mod_base = OTHER; note = uracil
  modified_base 179..180: mod_base = OTHER; note = uracil
  modified_base 182: mod_base = OTHER; note = uracil
  modified_base 184..185: mod_base = OTHER; note = uracil
  modified_base 189: mod_base = OTHER; note = uracil
  modified_base 195: mod_base = OTHER; note = uracil
  modified_base 198..200: mod_base = OTHER; note = uracil
  modified_base 203: mod_base = OTHER; note = uracil
  modified_base 211: mod_base = OTHER; note = uracil
  modified_base 213..215: mod_base = OTHER; note = uracil
  modified_base 217..219: mod_base = OTHER; note = uracil
  modified_base 229: mod_base = OTHER; note = uracil
  modified_base 234..235: mod_base = OTHER; note = uracil
  modified_base 238..239: mod_base = OTHER; note = uracil
  modified_base 243..247: mod_base = OTHER; note = uracil
  modified_base 252..253: mod_base = OTHER; note = uracil
  modified_base 256: mod_base = OTHER; note = uracil
  modified_base 264: mod_base = OTHER; note = uracil
  modified_base 267..268: mod_base = OTHER; note = uracil
  modified_base 272..274: mod_base = OTHER; note = uracil
  modified_base 276..278: mod_base = OTHER; note = uracil
  modified_base 280..281: mod_base = OTHER; note = uracil
  modified_base 283: mod_base = OTHER; note = uracil
  modified_base 290: mod_base = OTHER; note = uracil
  modified_base 298..299: mod_base = OTHER; note = uracil
  modified_base 48: mod_base = m5c
  modified_base 106: mod_base = m5c
  modified_base 122: mod_base = m5c
  modified_base 142: mod_base = m5c
  modified_base 162: mod_base = m5c
  modified_base 173: mod_base = m5c
  modified_base 227: mod_base = m5c
  modified_base 261: mod_base = m5c
  modified_base 284: mod_base = m5c
  variation 150: note = CpG site, residue is C if methylated or T(=U) if unmethylated
  variation 156: note = CpG site, residue is C if methylated or T(=U) if unmethylated
ttttagtgtgttttagttggtttatttgtaaaaatggggttaggttacgattggtgttttttttatagagaagtattttaggtaggggtgggtgggggtggaattcgtttttaatggttttcgggatagttttgtagttatcggtgattygggttygtttgcggatttttttcggtttttattttatttagggatagttttgtaatggggtttttttttaaaaaaacgtatggtttttttgttttttaaaattagtttaacggtagttattttttttttttttcgggggttgaaaaatta

SEQ ID NO: 318 - DNA, 300 bp, synthetic construct
  source 1..300: mol_type = other DNA
  modified_base 8: mod_base = OTHER; note = uracil
  modified_base 11..14: mod_base = OTHER; note = uracil
  modified_base 34: mod_base = OTHER; note = uracil
  modified_base 37: mod_base = OTHER; note = uracil
  modified_base 45: mod_base = OTHER; note = uracil
  modified_base 59: mod_base = OTHER; note = uracil
  modified_base 67..68: mod_base = OTHER; note = uracil
  modified_base 90..93: mod_base = OTHER; note = uracil
  modified_base 98: mod_base = OTHER; note = uracil
  modified_base 103: mod_base = OTHER; note = uracil
  modified_base 107..109: mod_base = OTHER; note = uracil
  modified_base 125: mod_base = OTHER; note = uracil
  modified_base 136: mod_base = OTHER; note = uracil
  modified_base 139: mod_base = OTHER; note = uracil
  modified_base 147..148: mod_base = OTHER; note = uracil
  modified_base 154: mod_base = OTHER; note = uracil
  modified_base 156: mod_base = OTHER; note = uracil
  modified_base 163: mod_base = OTHER; note = uracil
  modified_base 166: mod_base = OTHER; note = uracil
  modified_base 171: mod_base = OTHER; note = uracil
  modified_base 175..176: mod_base = OTHER; note = uracil
  modified_base 183..184: mod_base = OTHER; note = uracil
  modified_base 199..200: mod_base = OTHER; note = uracil
  modified_base 202..206: mod_base = OTHER; note = uracil
  modified_base 208..210: mod_base = OTHER; note = uracil
  modified_base 212..215: mod_base = OTHER; note = uracil
  modified_base 218..219: mod_base = OTHER; note = uracil
  modified_base 227: mod_base = OTHER; note = uracil
  modified_base 230: mod_base = OTHER; note = uracil
  modified_base 232: mod_base = OTHER; note = uracil
  modified_base 244: mod_base = OTHER; note = uracil
  modified_base 246..247: mod_base = OTHER; note = uracil
  modified_base 256..257: mod_base = OTHER; note = uracil
  modified_base 261..264: mod_base = OTHER; note = uracil
  modified_base 272: mod_base = OTHER; note = uracil
  modified_base 280..281: mod_base = OTHER; note = uracil
  modified_base 284: mod_base = OTHER; note = uracil
  modified_base 290: mod_base = OTHER; note = uracil
  modified_base 292: mod_base = OTHER; note = uracil
  modified_base 294: mod_base = OTHER; note = uracil
  modified_base 15: mod_base = m5c
  modified_base 38: mod_base = m5c
  modified_base 72: mod_base = m5c
  modified_base 126: mod_base = m5c
  modified_base 137: mod_base = m5c
  modified_base 157: mod_base = m5c
  modified_base 177: mod_base = m5c
  modified_base 193: mod_base = m5c
  modified_base 251: mod_base = m5c
  variation 143: note = CpG site, residue is C if methylated or T(=U) if unmethylated
  variation 149: note = CpG site, residue is C if methylated or T(=U) if unmethylated
ggttttttagttttcggaggagggagggaatggttgtcgttaagttggttttgggggataggaaggttatgcgtttttttgggagggagttttattgtagggttgtttttgaatggagtggaggtcgggaaagattcgtagaygaattygagttatcggtggttgtagggttgtttcgggggttattgagaacgagttttatttttatttatttttgtttggagtgtttttttgtaaagggaatattagtcgtggtttggttttatttttatagataaattaattgaggtatattggagg

SEQ ID NO: 319 - DNA, 301 bp, synthetic construct
  source 1..301: mol_type = other DNA
  modified_base 1: mod_base = OTHER; note = uracil
  modified_base 3: mod_base = OTHER; note = uracil
  modified_base 5: mod_base = OTHER; note = uracil
  modified_base 11: mod_base = OTHER; note = uracil
  modified_base 15: mod_base = OTHER; note = uracil
  modified_base 17: mod_base = OTHER; note = uracil
  modified_base 21: mod_base = OTHER; note = uracil
  modified_base 38: mod_base = OTHER; note = uracil
  modified_base 40: mod_base = OTHER; note = uracil
  modified_base 42: mod_base = OTHER; note = uracil
  modified_base 52: mod_base = OTHER; note = uracil
  modified_base 54: mod_base = OTHER; note = uracil
  modified_base 57: mod_base = OTHER; note = uracil
  modified_base 59..60: mod_base = OTHER; note = uracil
  modified_base 65: mod_base = OTHER; note = uracil
  modified_base 67..72: mod_base = OTHER; note = uracil
  modified_base 75: mod_base = OTHER; note = uracil
  modified_base 77: mod_base = OTHER; note = uracil
  modified_base 79: mod_base = OTHER; note = uracil
  modified_base 83: mod_base = OTHER; note = uracil
  modified_base 86..87: mod_base = OTHER; note = uracil
  modified_base 89: mod_base = OTHER; note = uracil
  modified_base 92..93: mod_base = OTHER; note = uracil
  modified_base 97: mod_base = OTHER; note = uracil
  modified_base 102: mod_base = OTHER; note = uracil
  modified_base 112..113: mod_base = OTHER; note = uracil
  modified_base 119..120: mod_base = OTHER; note = uracil
  modified_base 130: mod_base = OTHER; note = uracil
  modified_base 139: mod_base = OTHER; note = uracil
  modified_base 142..143: mod_base = OTHER; note = uracil
  modified_base 145..146: mod_base = OTHER; note = uracil
  modified_base 148..149: mod_base = OTHER; note = uracil
  modified_base 152..153: mod_base = OTHER; note = uracil
  modified_base 160..162: mod_base = OTHER; note = uracil
  modified_base 170: mod_base = OTHER; note = uracil
  modified_base 174: mod_base = OTHER; note = uracil
  modified_base 176: mod_base = OTHER; note = uracil
  modified_base 183: mod_base = OTHER; note = uracil
  modified_base 201..202: mod_base = OTHER; note = uracil
  modified_base 212..213: mod_base = OTHER; note = uracil
  modified_base 218: mod_base = OTHER; note = uracil
  modified_base 224: mod_base = OTHER; note = uracil
  modified_base 230: mod_base = OTHER; note = uracil
  modified_base 232: mod_base = OTHER; note = uracil
  modified_base 234..236: mod_base = OTHER; note = uracil
  modified_base 238: mod_base = OTHER; note = uracil
  modified_base 246..247: mod_base = OTHER; note = uracil
  modified_base 250: mod_base = OTHER; note = uracil
  modified_base 252: mod_base = OTHER; note = uracil
  modified_base 256: mod_base = OTHER; note = uracil
  modified_base 258..260: mod_base = OTHER; note = uracil
  modified_base 263: mod_base = OTHER; note = uracil
  modified_base 266: mod_base = OTHER; note = uracil
  modified_base 272..273: mod_base = OTHER; note = uracil
  modified_base 278: mod_base = OTHER; note = uracil
  modified_base 280: mod_base = OTHER; note = uracil
  modified_base 282..284: mod_base = OTHER; note = uracil
  modified_base 286: mod_base = OTHER; note = uracil
  modified_base 300: mod_base = OTHER; note = uracil
  modified_base 7: mod_base = m5c
  modified_base 18: mod_base = m5c
  modified_base 31: mod_base = m5c
  modified_base 131: mod_base = m5c
  modified_base 156: mod_base = m5c
  modified_base 168: mod_base = m5c
  modified_base 171: mod_base = m5c
  modified_base 177: mod_base = m5c
  modified_base 187: mod_base = m5c
  modified_base 193: mod_base = m5c
  modified_base 199: mod_base = m5c
  modified_base 254: mod_base = m5c
  modified_base 288: mod_base = m5c
  variation 150: note = CpG site, residue is C if methylated or T(=U) if unmethylated
tatttacgggttagtttcgttaggtgttgacggatgttatttaggtgtgagttttgtatttgagtttttttttgtatataggtagttataattagttagtgtagaggtgagtttgtggttagtgaggagtcggtgagttaattttttttygtttacgggttttgagacgtcggtttcgtgagtttgcggggtcgagggcgtttatattaagttaaggttgaggtagtgatatatttttttatgggtttgttttcgttttttgttttattgttttggtttttttttttcgtatggaggatta

SEQ ID NO: 320 - DNA, 301 bp, synthetic construct
  source 1..301: mol_type = other DNA
  modified_base 5..6: mod_base = OTHER; note = uracil
  modified_base 8..9: mod_base = OTHER; note = uracil
  modified_base 26..27: mod_base = OTHER; note = uracil
  modified_base 32: mod_base = OTHER; note = uracil
  modified_base 40: mod_base = OTHER; note = uracil
  modified_base 53: mod_base = OTHER; note = uracil
  modified_base 57..59: mod_base = OTHER; note = uracil
  modified_base 74: mod_base = OTHER; note = uracil
  modified_base 76: mod_base = OTHER; note = uracil
  modified_base 79..80: mod_base = OTHER; note = uracil
  modified_base 82: mod_base = OTHER; note = uracil
  modified_base 85..86: mod_base = OTHER; note = uracil
  modified_base 91: mod_base = OTHER; note = uracil
  modified_base 104..106: mod_base = OTHER; note = uracil
  modified_base 111..113: mod_base = OTHER; note = uracil
  modified_base 116: mod_base = OTHER; note = uracil
  modified_base 120: mod_base = OTHER; note = uracil
  modified_base 122: mod_base = OTHER; note = uracil
  modified_base 129: mod_base = OTHER; note = uracil
  modified_base 136: mod_base = OTHER; note = uracil
  modified_base 138: mod_base = OTHER; note = uracil
  modified_base 143..144: mod_base = OTHER; note = uracil
  modified_base 165: mod_base = OTHER; note = uracil
  modified_base 167: mod_base = OTHER; note = uracil
  modified_base 169: mod_base = OTHER; note = uracil
  modified_base 173: mod_base = OTHER; note = uracil
  modified_base 175..176: mod_base = OTHER; note = uracil
  modified_base 178: mod_base = OTHER; note = uracil
  modified_base 180: mod_base = OTHER; note = uracil
  modified_base 184..185: mod_base = OTHER; note = uracil
  modified_base 187: mod_base = OTHER; note = uracil
  modified_base 191: mod_base = OTHER; note = uracil
  modified_base 193: mod_base = OTHER; note = uracil
  modified_base 195..196: mod_base = OTHER; note = uracil
  modified_base 198: mod_base = OTHER; note = uracil
  modified_base 201: mod_base = OTHER; note = uracil
  modified_base 203: mod_base = OTHER; note = uracil
  modified_base 207: mod_base = OTHER; note = uracil
  modified_base 217: mod_base = OTHER; note = uracil
  modified_base 220..221: mod_base = OTHER; note = uracil
  modified_base 228: mod_base = OTHER; note = uracil
  modified_base 238: mod_base = OTHER; note = uracil
  modified_base 240: mod_base = OTHER; note = uracil
  modified_base 246: mod_base = OTHER; note = uracil
  modified_base 251: mod_base = OTHER; note = uracil
  modified_base 253: mod_base = OTHER; note = uracil
  modified_base 255: mod_base = OTHER; note = uracil
  modified_base 257..258: mod_base = OTHER; note = uracil
  modified_base 266: mod_base = OTHER; note = uracil
  modified_base 269: mod_base = OTHER; note = uracil
  modified_base 273: mod_base = OTHER; note = uracil
  modified_base 276: mod_base = OTHER; note = uracil
  modified_base 278..279: mod_base = OTHER; note = uracil
  modified_base 288: mod_base = OTHER; note = uracil
  modified_base 292..293: mod_base = OTHER; note = uracil
  modified_base 13: mod_base = m5c
  modified_base 47: mod_base = m5c
  modified_base 102: mod_base = m5c
  modified_base 108: mod_base = m5c
  modified_base 114: mod_base = m5c
  modified_base 124: mod_base = m5c
  modified_base 130: mod_base = m5c
  modified_base 133: mod_base = m5c
  modified_base 145: mod_base = m5c
  modified_base 170: mod_base = m5c
  modified_base 270: mod_base = m5c
  modified_base 283: mod_base = m5c
  modified_base 294: mod_base = m5c
  variation 151: note = CpG site, residue is C if methylated or T(=U) if unmethylated
tgattttttatacgagagggagagattaggataatgaagtagggagcgagagtaggtttataagagggtgtgttattgttttagttttggtttaatataggcgttttcgatttcgtaagtttacggagtcggcgttttagggttcgtaggygggaggaggttgatttatcggttttttattggttataggtttatttttgtattgattggttgtggttgtttgtgtgtaggggggagtttaggtgtagagtttatatttgagtgatattcgttaatatttgacggagttagttcgtgagtg

SEQ ID NO: 321 - DNA, 300 bp, synthetic construct
  source 1..300: mol_type = other DNA
  modified_base 1..2: mod_base = OTHER; note = uracil
  modified_base 6: mod_base = OTHER; note = uracil
  modified_base 9..10: mod_base = OTHER; note = uracil
  modified_base 22: mod_base = OTHER; note = uracil
  modified_base 24..25: mod_base = OTHER; note = uracil
  modified_base 27..28: mod_base = OTHER; note = uracil
  modified_base 32: mod_base = OTHER; note = uracil
  modified_base 36: mod_base = OTHER; note = uracil
  modified_base 44: mod_base = OTHER; note = uracil
  modified_base 48..49: mod_base = OTHER; note = uracil
  modified_base 60..62: mod_base = OTHER; note = uracil
  modified_base 64..66: mod_base = OTHER; note = uracil
  modified_base 69..70: mod_base = OTHER; note = uracil
  modified_base 72: mod_base = OTHER; note = uracil
  modified_base 76..77: mod_base = OTHER; note = uracil
  modified_base 85..87: mod_base = OTHER; note = uracil
  modified_base 90..91: mod_base = OTHER; note = uracil
  modified_base 95: mod_base = OTHER; note = uracil
  modified_base 102: mod_base = OTHER; note = uracil
  modified_base 112: mod_base = OTHER; note = uracil
  modified_base 133: mod_base = OTHER; note = uracil
  modified_base 140..141: mod_base = OTHER; note = uracil
  modified_base 147: mod_base = OTHER; note = uracil
  modified_base 149..150: mod_base = OTHER; note = uracil
  modified_base 159: mod_base = OTHER; note = uracil
  modified_base 168: mod_base = OTHER; note = uracil
  modified_base 171..172: mod_base = OTHER; note = uracil
  modified_base 174..176: mod_base = OTHER; note = uracil
  modified_base 180..183: mod_base = OTHER; note = uracil
  modified_base 186: mod_base = OTHER; note = uracil
  modified_base 188: mod_base = OTHER; note = uracil
  modified_base 190: mod_base = OTHER; note = uracil
  modified_base 198: mod_base = OTHER; note = uracil
  modified_base 208: mod_base = OTHER; note = uracil
  modified_base 213..214: mod_base = OTHER; note = uracil
  modified_base 217: mod_base = OTHER; note = uracil
  modified_base 225..229: mod_base = OTHER; note = uracil
  modified_base 232..234: mod_base = OTHER; note = uracil
  modified_base 240: mod_base = OTHER; note = uracil
  modified_base 242..244: mod_base = OTHER; note = uracil
  modified_base 251..252: mod_base = OTHER; note = uracil
  modified_base 255..256: mod_base = OTHER; note = uracil
  modified_base 258: mod_base = OTHER; note = uracil
  modified_base 260..263: mod_base = OTHER; note = uracil
  modified_base 266..268: mod_base = OTHER; note = uracil
  modified_base 272..274: mod_base = OTHER; note = uracil
  modified_base 283: mod_base = OTHER; note = uracil
  modified_base 290: mod_base = OTHER; note = uracil
  modified_base 292: mod_base = OTHER; note = uracil
  modified_base 45: mod_base = m5c
  modified_base 78: mod_base = m5c
  modified_base 142: mod_base = m5c
  modified_base 144: mod_base = m5c
  modified_base 199: mod_base = m5c
  modified_base 215: mod_base = m5c
  modified_base 218: mod_base = m5c
  modified_base 221: mod_base = m5c
  modified_base 223: mod_base = m5c
  modified_base 230: mod_base = m5c
  modified_base 235: mod_base = m5c
  modified_base 237: mod_base = m5c
  modified_base 270: mod_base = m5c
  modified_base 287: mod_base = m5c
  modified_base 297: mod_base = m5c
  variation 116: note = CpG site, residue is C if methylated or T(=U) if unmethylated
  variation 120: note = CpG site, residue is C if methylated or T(=U) if unmethylated
  variation 129: note = CpG site, residue is C if methylated or T(=U) if unmethylated
  variation 138: note = CpG site, residue is C if methylated or T(=U) if unmethylated
  variation 151: note = CpG site, residue is C if methylated or T(=U) if unmethylated
  variation 153: note = CpG site, residue is C if methylated or T(=U) if unmethylated
  variation 161: note = CpG site, residue is C if methylated or T(=U) if unmethylated
  variation 163: note = CpG site, residue is C if methylated or T(=U) if unmethylated
  variation 178: note = CpG site, residue is C if methylated or T(=U) if unmethylated
  variation 184: note = CpG site, residue is C if methylated or T(=U) if unmethylated
ttaggttgtttgggttttggtttttattatgttagtttggtgttcgatttgtgttgagattttttttgtttttggttcgggtgttttatttaagtaatggataggttggaataggygttygtagggaaygggttgaaygttcgcggttttygygatgtttygygatattatttttttygttttygtttatttaaggatcggaagtagtaaagttcgtcgtcgcgtttttcgtttcgcgtttttttggtaattagtttttttttttttttcgtttataaggagtaagcggtataaatcggg

SEQ ID NO: 322 - DNA, 300 bp, synthetic construct
  source 1..300: mol_type = other DNA
  modified_base 1..2: mod_base = OTHER; note = uracil
  modified_base 12: mod_base = OTHER; note = uracil
  modified_base 15: mod_base = OTHER; note = uracil
  modified_base 19: mod_base = OTHER; note = uracil
  modified_base 21..22: mod_base = OTHER; note = uracil
  modified_base 47: mod_base = OTHER; note = uracil
  modified_base 54..55: mod_base = OTHER; note = uracil
  modified_base 89: mod_base = OTHER; note = uracil
  modified_base 94: mod_base = OTHER; note = uracil
  modified_base 97: mod_base = OTHER; note = uracil
  modified_base 100: mod_base = OTHER; note = uracil
  modified_base 105..106: mod_base = OTHER; note = uracil
  modified_base 144: mod_base = OTHER; note = uracil
  modified_base 155: mod_base = OTHER; note = uracil
  modified_base 166: mod_base = OTHER; note = uracil
  modified_base 169..170: mod_base = OTHER; note = uracil
  modified_base 175..177: mod_base = OTHER; note = uracil
  modified_base 186..187: mod_base = OTHER; note = uracil
  modified_base 192..193: mod_base = OTHER; note = uracil
  modified_base 196..197: mod_base = OTHER; note = uracil
  modified_base 201..202: mod_base = OTHER; note = uracil
  modified_base 207: mod_base = OTHER; note = uracil
  modified_base 218: mod_base = OTHER; note = uracil
  modified_base 220..221: mod_base = OTHER; note = uracil
  modified_base 226..227: mod_base = OTHER; note = uracil
  modified_base 233: mod_base = OTHER; note = uracil
  modified_base 243: mod_base = OTHER; note = uracil
  modified_base 245: mod_base = OTHER; note = uracil
  modified_base 248: mod_base = OTHER; note = uracil
  modified_base 250: mod_base = OTHER; note = uracil
  modified_base 259: mod_base = OTHER; note = uracil
  modified_base 261..262: mod_base = OTHER; note = uracil
  modified_base 266: mod_base = OTHER; note = uracil
  modified_base 270: mod_base = OTHER; note = uracil
  modified_base 281..282: mod_base = OTHER; note = uracil
  modified_base 287..289: mod_base = OTHER; note = uracil
  modified_base 293: mod_base = OTHER; note = uracil
  modified_base 296..297: mod_base = OTHER; note = uracil
  modified_base 3: mod_base = m5c
  modified_base 13: mod_base = m5c
  modified_base 30: mod_base = m5c
  modified_base 63: mod_base = m5c
  modified_base 65: mod_base = m5c
  modified_base 70: mod_base = m5c
  modified_base 77: mod_base = m5c
  modified_base 79: mod_base = m5c
  modified_base 82: mod_base = m5c
  modified_base 85: mod_base = m5c
  modified_base 101: mod_base = m5c
  modified_base 156: mod_base = m5c
  modified_base 158: mod_base = m5c
  modified_base 222: mod_base = m5c
  modified_base 255: mod_base = m5c
  variation 116: note = CpG site, residue is C if methylated or T(=U) if unmethylated
  variation 122: note = CpG site, residue is C if methylated or T(=U) if unmethylated
  variation 137: note = CpG site, residue is C if methylated or T(=U) if unmethylated
  variation 139: note = CpG site, residue is C if methylated or T(=U) if unmethylated
  variation 147: note = CpG site, residue is C if methylated or T(=U) if unmethylated
  variation 149: note = CpG site, residue is C if methylated or T(=U) if unmethylated
  variation 162: note = CpG site, residue is C if methylated or T(=U) if unmethylated
  variation 171: note = CpG site, residue is C if methylated or T(=U) if unmethylated
  variation 180: note = CpG site, residue is C if methylated or T(=U) if unmethylated
  variation 184: note = CpG site, residue is C if methylated or T(=U) if unmethylated
ttcgatttgtgtcgtttgttttttatgggcgagggaaggggagaggttggttattagggagacgcggggcggggggcgcgacggcgggttttgttattttcggtttttaagtgagygggggygagggaggtagtatygygagatatygygggagtcgcgggygtttagttygttttttaygaaygtttgttttaatttgtttattgtttggatgggatattcgggttagaggtagggagggttttaatataggtcggatattaagttagtatggtggagattaaaatttaggtagtttgg

SEQ ID NO: 323 - DNA, 300 bp, synthetic construct
  source 1..300: mol_type = other DNA
  modified_base 1: mod_base = OTHER; note = uracil
  modified_base 7..8: mod_base = OTHER; note = uracil
  modified_base 10: mod_base = OTHER; note = uracil
  modified_base 14: mod_base = OTHER; note = uracil
  modified_base 17: mod_base = OTHER; note = uracil
  modified_base 20..21: mod_base = OTHER; note = uracil
  modified_base 35: mod_base = OTHER; note = uracil
  modified_base 44..47: mod_base = OTHER; note = uracil
  modified_base 63: mod_base = OTHER; note = uracil
  modified_base 75: mod_base = OTHER; note = uracil
  modified_base 81: mod_base = OTHER; note = uracil
  modified_base 83..85: mod_base = OTHER; note = uracil
  modified_base 88..89: mod_base = OTHER; note = uracil
  modified_base 93..94: mod_base = OTHER; note = uracil
  modified_base 99..101: mod_base = OTHER; note = uracil
  modified_base 104..105: mod_base = OTHER; note = uracil
  modified_base 108..109: mod_base = OTHER; note = uracil
  modified_base 112..116: mod_base = OTHER; note = uracil
  modified_base 119..123: mod_base = OTHER; note = uracil
  modified_base 125: mod_base = OTHER; note = uracil
  modified_base 128: mod_base = OTHER; note = uracil
  modified_base 131: mod_base = OTHER; note = uracil
  modified_base 134..135: mod_base = OTHER; note = uracil
  modified_base 138..140: mod_base = OTHER; note = uracil
  modified_base 146: mod_base = OTHER; note = uracil
  modified_base 154..156: mod_base = OTHER; note = uracil
  modified_base 159..160: mod_base = OTHER; note = uracil
  modified_base 163..164: mod_base = OTHER; note = uracil
  modified_base 166..167: mod_base = OTHER; note = uracil
  modified_base 169: mod_base = OTHER; note = uracil
  modified_base 174: mod_base = OTHER; note = uracil
  modified_base 176..177: mod_base = OTHER; note = uracil
  modified_base 183: mod_base = OTHER; note = uracil
  modified_base 191: mod_base = OTHER; note = uracil
  modified_base 195: mod_base = OTHER; note = uracil
  modified_base 198..199: mod_base = OTHER; note = uracil
  modified_base 204..205: mod_base = OTHER; note = uracil
  modified_base 209..210: mod_base = OTHER; note = uracil
  modified_base 216: mod_base = OTHER; note = uracil
  modified_base 218..219: mod_base = OTHER; note = uracil
  modified_base 222: mod_base = OTHER; note = uracil
  modified_base 233..234: mod_base = OTHER; note = uracil
  modified_base 239..240: mod_base = OTHER; note = uracil
  modified_base 246: mod_base = OTHER; note = uracil
  modified_base 248..250: mod_base = OTHER; note = uracil
  modified_base 258: mod_base = OTHER; note = uracil
  modified_base 260: mod_base = OTHER; note = uracil
  modified_base 267: mod_base = OTHER; note = uracil
  modified_base 269: mod_base = OTHER; note = uracil
  modified_base 271: mod_base = OTHER; note = uracil
  modified_base 275: mod_base = OTHER; note = uracil
  modified_base 280: mod_base = OTHER; note = uracil
  modified_base 284..285: mod_base = OTHER; note = uracil
  modified_base 287: mod_base = OTHER; note = uracil
  modified_base 292..293: mod_base = OTHER; note = uracil
  modified_base 295: mod_base = OTHER; note = uracil
  modified_base 298: mod_base = OTHER; note = uracil
  modified_base 300: mod_base = OTHER; note = uracil
  modified_base 23: mod_base = m5c
  modified_base 30: mod_base = m5c
  modified_base 52: mod_base = m5c
  modified_base 56: mod_base = m5c
  modified_base 126: mod_base = m5c
  modified_base 136: mod_base = m5c
  modified_base 141: mod_base = m5c
  modified_base 200: mod_base = m5c
  variation 149: note = CpG site, residue is C if methylated or T(=U) if unmethylated
  variation 184: note = CpG site, residue is C if methylated or T(=U) if unmethylated
taatggtttttttttttagtttcggtgggcgtggttgggggaattttagggcgggcggggggtagggggtggtgttgagttatttagtttggttaggtttttgtttgttagttttttgtttttatcgttatagttcgtttcggatttaygaggtttagttagttatttttggatttttgagatygaattgtaaattgttcgggtttggttttgaatttttgttgtttagggattaagttttgtggtttttaggggggtatagtgattttttaagttgagttggttttagggtttttgtat

SEQ ID NO: 324 - DNA, 300 bp, synthetic construct
  source 1..300: mol_type = other DNA
  modified_base 3: mod_base = OTHER; note = uracil
  modified_base 9..11: mod_base = OTHER; note = uracil
  modified_base 17..18: mod_base = OTHER; note = uracil
  modified_base 21: mod_base = OTHER; note = uracil
  modified_base 23: mod_base = OTHER; note = uracil
  modified_base 26: mod_base = OTHER; note = uracil
  modified_base 36: mod_base = OTHER; note = uracil
  modified_base 38: mod_base = OTHER; note = uracil
  modified_base 43..48: mod_base = OTHER; note = uracil
  modified_base 55..56: mod_base = OTHER; note = uracil
  modified_base 58: mod_base = OTHER; note = uracil
  modified_base 63: mod_base = OTHER; note = uracil
  modified_base 69..71: mod_base = OTHER; note = uracil
  modified_base 76: mod_base = OTHER; note = uracil
  modified_base 79: mod_base = OTHER; note = uracil
  modified_base 87: mod_base = OTHER; note = uracil
  modified_base 92..93: mod_base = OTHER; note = uracil
  modified_base 97..98: mod_base = OTHER; note = uracil
  modified_base 103: mod_base = OTHER; note = uracil
  modified_base 110: mod_base = OTHER; note = uracil
  modified_base 119: mod_base = OTHER; note = uracil
  modified_base 121: mod_base = OTHER; note = uracil
  modified_base 128..129: mod_base = OTHER; note = uracil
  modified_base 138: mod_base = OTHER; note = uracil
  modified_base 142: mod_base = OTHER; note = uracil
  modified_base 147..148: mod_base = OTHER; note = uracil
  modified_base 157: mod_base = OTHER; note = uracil
  modified_base 167: mod_base = OTHER; note = uracil
  modified_base 182: mod_base = OTHER; note = uracil
  modified_base 189: mod_base = OTHER; note = uracil
  modified_base 193: mod_base = OTHER; note = uracil
  modified_base 197: mod_base = OTHER; note = uracil
  modified_base 203..204: mod_base = OTHER; note = uracil
  modified_base 208..209: mod_base = OTHER; note = uracil
  modified_base 213: mod_base = OTHER; note = uracil
  modified_base 221: mod_base = OTHER; note = uracil
  modified_base 223: mod_base = OTHER; note = uracil
  modified_base 226: mod_base = OTHER; note = uracil
  modified_base 228..229: mod_base = OTHER; note = uracil
  modified_base 231..235: mod_base = OTHER; note = uracil
  modified_base 238..242: mod_base = OTHER; note = uracil
  modified_base 245..246: mod_base = OTHER; note = uracil
  modified_base 249..251: mod_base = OTHER; note = uracil
  modified_base 259..263: mod_base = OTHER; note = uracil
  modified_base 266..267: mod_base = OTHER; note = uracil
  modified_base 271..273: mod_base = OTHER; note = uracil
  modified_base 275: mod_base = OTHER; note = uracil
  modified_base 281: mod_base = OTHER; note = uracil
  modified_base 294..295: mod_base = OTHER; note = uracil
  modified_base 99: mod_base = m5c
  modified_base 158: mod_base = m5c
  modified_base 163: mod_base = m5c
  modified_base 173: mod_base = m5c
  modified_base 243: mod_base = m5c
  modified_base 247: mod_base = m5c
  modified_base 269: mod_base = m5c
  modified_base 276: mod_base = m5c
  variation 115: note = CpG site, residue is C if methylated or T(=U) if unmethylated
  variation 150: note = CpG site, residue is C if methylated or T(=U) if unmethylated
tgtagaggttttgaggttagtttagtttgagagattattgtgtttttttgggagttataggatttggtttttaaatagtaggagtttaaggttaggttcgggtagtttgtaattyggttttaggagtttagaggtggttggttgggtttygtagattcggggcgggttgtagcggtgggggtagggggttggtaggtagggatttggttaggttgggtgatttagtattattttttgtttttcgttcgttttggggtttttttagttacgtttatcgaggttgaagaaagaggttattgt

SEQ ID NO: 325 - DNA, 300 bp, synthetic construct
  source 1..300: mol_type = other DNA
  modified_base 2..4: mod_base = OTHER; note = uracil
  modified_base 9: mod_base = OTHER; note = uracil
  modified_base 14..15: mod_base = OTHER; note = uracil
  modified_base 18: mod_base = OTHER; note = uracil
  modified_base 21..22: mod_base = OTHER; note = uracil
  modified_base 30..31: mod_base = OTHER; note = uracil
  modified_base 33..34: mod_base = OTHER; note = uracil
  modified_base 36..37: mod_base = OTHER; note = uracil
  modified_base 40..41: mod_base = OTHER; note = uracil
  modified_base 46..47: mod_base = OTHER; note = uracil
  modified_base 51..52: mod_base = OTHER; note = uracil
  modified_base 56: mod_base = OTHER; note = uracil
  modified_base 59..61: mod_base = OTHER; note = uracil
  modified_base 71: mod_base = OTHER; note = uracil
  modified_base 83: mod_base = OTHER; note = uracil
  modified_base 85..86: mod_base = OTHER; note = uracil
  modified_base 92: mod_base = OTHER; note = uracil
  modified_base 95..96: mod_base = OTHER; note = uracil
  modified_base 98..99: mod_base = OTHER; note = uracil
  modified_base 101..103: mod_base = OTHER; note = uracil
  modified_base 107..108: mod_base = OTHER; note = uracil
  modified_base 110..111: mod_base = OTHER; note = uracil
  modified_base 115..117: mod_base = OTHER; note = uracil
  modified_base 122: mod_base = OTHER; note = uracil
  modified_base 125: mod_base = OTHER; note = uracil
  modified_base 135: mod_base = OTHER; note = uracil
  modified_base 140..141: mod_base = OTHER; note = uracil
  modified_base 143: mod_base = OTHER; note = uracil
  modified_base 148: mod_base = OTHER; note = uracil
  modified_base 151: mod_base = OTHER; note = uracil
  modified_base 155: mod_base = OTHER; note = uracil
  modified_base 158..160: mod_base = OTHER; note = uracil
  modified_base 163..164: mod_base = OTHER; note = uracil
  modified_base 169: mod_base = OTHER; note = uracil
  modified_base 175..176: mod_base = OTHER; note = uracil
  modified_base 180: mod_base = OTHER; note = uracil
  modified_base 183..184: mod_base = OTHER; note = uracil
  modified_base 188..189: mod_base = OTHER; note = uracil
  modified_base 191: mod_base = OTHER; note = uracil
  modified_base 193..196: mod_base = OTHER; note = uracil
  modified_base 199: mod_base = OTHER; note = uracil
  modified_base 203..207: mod_base = OTHER; note = uracil
  modified_base 212: mod_base = OTHER; note = uracil
  modified_base 214: mod_base = OTHER; note = uracil
  modified_base 218..219: mod_base = OTHER; note = uracil
  modified_base 223..226: mod_base = OTHER; note = uracil
  modified_base 231..234: mod_base = OTHER; note = uracil
  modified_base 240: mod_base = OTHER; note = uracil
  modified_base 242..245: mod_base = OTHER; note = uracil
  modified_base 254: mod_base = OTHER; note = uracil
  modified_base 256: mod_base = OTHER; note = uracil
  modified_base 259: mod_base = OTHER; note = uracil
  modified_base 263..264: mod_base = OTHER; note = uracil
  modified_base 274: mod_base = OTHER; note = uracil
  modified_base 278: mod_base = OTHER; note = uracil
  modified_base 287: mod_base = OTHER; note = uracil
  modified_base 289..291: mod_base = OTHER; note = uracil
  modified_base 294..295: mod_base = OTHER; note = uracil
  modified_base 299..300: mod_base = OTHER; note = uracil
  modified_base 23: mod_base = m5c
  modified_base 42: mod_base = m5c
  modified_base 53: mod_base = m5c
  modified_base 57: mod_base = m5c
  modified_base 75: mod_base = m5c
  modified_base 78: mod_base = m5c
  modified_base 87: mod_base = m5c
  modified_base 119: mod_base = m5c
  modified_base 165: mod_base = m5c
  modified_base 185: mod_base = m5c
  modified_base 272: mod_base = m5c
  modified_base 279: mod_base = m5c
  modified_base 285: mod_base = m5c
  variation 149: note = CpG site, residue is C if methylated or T(=U) if unmethylated
attttgtgtagggtttgtatttcggaaggtttttattagttcgaatttggttcgttcgttttagatggggtaatcggcgtttttttcgggatagttttttttttggttttttggttttcgtttgtattgagaggtttggtttttggttygtatgttgtttttttcgtgttgtggttttgtagttcggttttttttttgttgttttttttggttttggtttggtttttgggtttttgagttatttttgaggtgatttagtagtttttggaaacgtatgtcgaggacgtattttgtttggtt

SEQ ID NO: 326 - DNA, 300 bp, synthetic construct
  source 1..300: mol_type = other DNA
  modified_base 2..3: mod_base = OTHER; note = uracil
  modified_base 7: mod_base = OTHER; note = uracil
  modified_base 17..18: mod_base = OTHER; note = uracil
  modified_base 23: mod_base = OTHER; note = uracil
  modified_base 32..33: mod_base = OTHER; note = uracil
  modified_base 39: mod_base = OTHER; note = uracil
  modified_base 42: mod_base = OTHER; note = uracil
  modified_base 48: mod_base = OTHER; note = uracil
  modified_base 50..51: mod_base = OTHER; note = uracil
  modified_base 53: mod_base = OTHER; note = uracil
  modified_base 62: mod_base = OTHER; note = uracil
  modified_base 64: mod_base = OTHER; note = uracil
  modified_base 70..72: mod_base = OTHER; note = uracil
  modified_base 78..79: mod_base = OTHER; note = uracil
  modified_base 83..84: mod_base = OTHER; note = uracil
  modified_base 89..90: mod_base = OTHER; note = uracil
  modified_base 99: mod_base = OTHER; note = uracil
  modified_base 102: mod_base = OTHER; note = uracil
  modified_base 113: mod_base = OTHER; note = uracil
  modified_base 118: mod_base = OTHER; note = uracil
  modified_base 121: mod_base = OTHER; note = uracil
  modified_base 126..127: mod_base = OTHER; note = uracil
  modified_base 129: mod_base = OTHER; note = uracil
  modified_base 132: mod_base = OTHER; note = uracil
  modified_base 143: mod_base = OTHER; note = uracil
  modified_base 146: mod_base = OTHER; note = uracil
  modified_base 154..155: mod_base = OTHER; note = uracil
  modified_base 161..162: mod_base = OTHER; note = uracil
  modified_base 166..167: mod_base = OTHER; note = uracil
  modified_base 169: mod_base = OTHER; note = uracil
  modified_base 171: mod_base = OTHER; note = uracil
  modified_base 176: mod_base = OTHER; note = uracil
  modified_base 186..187: mod_base = OTHER; note = uracil
  modified_base 194..195: mod_base = OTHER; note = uracil
  modified_base 206: mod_base = OTHER; note = uracil
  modified_base 210..211: mod_base = OTHER; note = uracil
  modified_base 223: mod_base = OTHER; note = uracil
  modified_base 230..233: mod_base = OTHER; note = uracil
  modified_base 236: mod_base = OTHER; note = uracil
  modified_base 250..251: mod_base = OTHER; note = uracil
  modified_base 261: mod_base = OTHER; note = uracil
  modified_base 271..272: mod_base = OTHER; note = uracil
  modified_base 275: mod_base = OTHER; note = uracil
  modified_base 283: mod_base = OTHER; note = uracil
  modified_base 287..289: mod_base = OTHER; note = uracil
  modified_base 292: mod_base = OTHER; note = uracil
  modified_base 294: mod_base = OTHER; note = uracil
  modified_base 14: mod_base = m5c
  modified_base 20: mod_base = m5c
  modified_base 27: mod_base = m5c
  modified_base 114: mod_base = m5c
  modified_base 134: mod_base = m5c
  modified_base 180: mod_base = m5c
  modified_base 212: mod_base = m5c
  modified_base 221: mod_base = m5c
  modified_base 224: mod_base = m5c
  modified_base 242: mod_base = m5c
  modified_base 246: mod_base = m5c
  modified_base 257: mod_base = m5c
  modified_base 276: mod_base = m5c
  variation 150: note = CpG site, residue is C if methylated or T(=U) if unmethylated
gttaggtagggtgcgttttcggtatgcgtttttaaggattgttgagttattttaggggtgatttaggggtttaggggttaggttagagttaagggggatagtaggggagaggtcgggttgtaaggttatagtacgggaagggtagtatgyggattagaggttaagttttttaatgtagacgagggttaggaggttagggaggaggttgtttcgggagaaacgtcgattgttttatttagggcggacgggttaggttcgggttggtggaggtttttcgggatgtaggttttgtatagggtt

SEQ ID NO: 327 - DNA, 300 bp, synthetic construct
  source 1..300: mol_type = other DNA
  modified_base 5..6: mod_base = OTHER; note = uracil
  modified_base 13: mod_base = OTHER; note = uracil
  modified_base 16: mod_base = OTHER; note = uracil
  modified_base 19..21: mod_base = OTHER; note = uracil
  modified_base 23: mod_base = OTHER; note = uracil
  modified_base 26: mod_base = OTHER; note = uracil
  modified_base 41: mod_base = OTHER; note = uracil
  modified_base 46..47: mod_base = OTHER; note = uracil
  modified_base 55: mod_base = OTHER; note = uracil
  modified_base 65: mod_base = OTHER; note = uracil
  modified_base 79..80: mod_base = OTHER; note = uracil
  modified_base 85: mod_base = OTHER; note = uracil
  modified_base 106..108: mod_base = OTHER; note = uracil
  modified_base 113: mod_base = OTHER; note = uracil
  modified_base 118: mod_base = OTHER; note = uracil
  modified_base 120: mod_base = OTHER; note = uracil
  modified_base 125: mod_base = OTHER; note = uracil
  modified_base 128: mod_base = OTHER; note = uracil
  modified_base 130: mod_base = OTHER; note = uracil
  modified_base 133: mod_base = OTHER; note = uracil
  modified_base 137: mod_base = OTHER; note = uracil
  modified_base 139: mod_base = OTHER; note = uracil
  modified_base 153: mod_base = OTHER; note = uracil
  modified_base 156..157: mod_base = OTHER; note = uracil
  modified_base 163..164: mod_base = OTHER; note = uracil
  modified_base 168: mod_base = OTHER; note = uracil
  modified_base 172..173: mod_base = OTHER; note = uracil
  modified_base 178..179: mod_base = OTHER; note = uracil
  modified_base 182: mod_base = OTHER; note = uracil
  modified_base 187..189: mod_base = OTHER; note = uracil
  modified_base 192..193: mod_base = OTHER; note = uracil
  modified_base 196..197: mod_base = OTHER; note = uracil
  modified_base 208..209: mod_base = OTHER; note = uracil
  modified_base 241: mod_base = OTHER; note = uracil
  modified_base 246..248: mod_base = OTHER; note = uracil
  modified_base 264: mod_base = OTHER; note = uracil
  modified_base 277: mod_base = OTHER; note = uracil
  modified_base 289: mod_base = OTHER; note = uracil
  modified_base 294: mod_base = OTHER; note = uracil
  modified_base 296: mod_base = OTHER; note = uracil
  modified_base 29: mod_base = m5c
  modified_base 42: mod_base = m5c
  modified_base 49: mod_base = m5c
  modified_base 71: mod_base = m5c
  modified_base 99: mod_base = m5c
  modified_base 126: mod_base = m5c
  modified_base 158: mod_base = m5c
  modified_base 165: mod_base = m5c
  modified_base 198: mod_base = m5c
  modified_base 203: mod_base = m5c
  modified_base 229: mod_base = m5c
  modified_base 242: mod_base = m5c
  variation 151: note = CpG site, residue is C if methylated or T(=U) if unmethylated
ggaattattgttttgttgtttatagttgcgtggagggatttcggttttcgggtttagttggtgatagtgtcgggtaggtttgggtaggtgggagaggtcgtgaagttttttgtagggtatttggtcgtttatttggtataggggaagaggygtagttcgtggttcggtagtttaggatttgttgttttttttttattcggggcggggtttgtgggaagatatggaagtcgggtgaatgagtcgtgtttagtgattttaaaaagtagattaaaataatatagaaaatgttagagtttattg

SEQ ID NO: 328 - DNA, 300 bp, synthetic construct
  source 1..300: mol_type = other DNA
  modified_base 1: mod_base = OTHER; note = uracil
  modified_base 8: mod_base = OTHER; note = uracil
  modified_base 10: mod_base = OTHER; note = uracil
  modified_base 14: mod_base = OTHER; note = uracil
  modified_base 20: mod_base = OTHER; note = uracil
  modified_base 35: mod_base = OTHER; note = uracil
  modified_base 38: mod_base = OTHER; note = uracil
  modified_base 49: mod_base = OTHER; note = uracil
  modified_base 51: mod_base = OTHER; note = uracil
  modified_base 56: mod_base = OTHER; note = uracil
  modified_base 61: mod_base = OTHER; note = uracil
  modified_base 63: mod_base = OTHER; note = uracil
  modified_base 67: mod_base = OTHER; note = uracil
  modified_base 69..70: mod_base = OTHER; note = uracil
  modified_base 74: mod_base = OTHER; note = uracil
  modified_base 77..78: mod_base = OTHER; note = uracil
  modified_base 83: mod_base = OTHER; note = uracil
  modified_base 86..88: mod_base = OTHER; note = uracil
  modified_base 90: mod_base = OTHER; note = uracil
  modified_base 94..96: mod_base = OTHER; note = uracil
  modified_base 99..101: mod_base = OTHER; note = uracil
  modified_base 117: mod_base = OTHER; note = uracil
  modified_base 120: mod_base = OTHER; note = uracil
  modified_base 125..126: mod_base = OTHER; note = uracil
  modified_base 131: mod_base = OTHER; note = uracil
  modified_base 134: mod_base = OTHER; note = uracil
  modified_base 139..140: mod_base = OTHER; note = uracil
  modified_base 146: mod_base = OTHER; note = uracil
  modified_base 151..152: mod_base = OTHER; note = uracil
  modified_base 154: mod_base = OTHER; note = uracil
  modified_base 157..160: mod_base = OTHER; note = uracil
  modified_base 165..166: mod_base = OTHER; note = uracil
  modified_base 177..178: mod_base = OTHER; note = uracil
  modified_base 184..186: mod_base = OTHER; note = uracil
  modified_base 189: mod_base = OTHER; note = uracil
  modified_base 196: mod_base = OTHER; note = uracil
  modified_base 199: mod_base = OTHER; note = uracil
  modified_base 204..205: mod_base = OTHER; note = uracil
  modified_base 207: mod_base = OTHER; note = uracil
  modified_base 209..211: mod_base = OTHER; note = uracil
  modified_base 213..214: mod_base = OTHER; note = uracil
  modified_base 217..219: mod_base = OTHER; note = uracil
  modified_base 223..224: mod_base = OTHER; note = uracil
  modified_base 227..228: mod_base = OTHER; note = uracil
  modified_base 232: mod_base = OTHER; note = uracil
  modified_base 234: mod_base = OTHER; note = uracil
  modified_base 238: mod_base = OTHER; note = uracil
  modified_base 240..241: mod_base = OTHER; note = uracil
  modified_base 244: mod_base = OTHER; note = uracil
  modified_base 249..250: mod_base = OTHER; note = uracil
  modified_base 257: mod_base = OTHER; note = uracil
  modified_base 264..266: mod_base = OTHER; note = uracil
  modified_base 268..269: mod_base = OTHER; note = uracil
  modified_base 273: mod_base = OTHER; note = uracil
  modified_base 276: mod_base = OTHER; note = uracil
  modified_base 283: mod_base = OTHER; note = uracil
  modified_base 286: mod_base = OTHER; note = uracil
  modified_base 291: mod_base = OTHER; note = uracil
  modified_base 299..300: mod_base = OTHER; note = uracil
  modified_base 58: mod_base = m5c
  modified_base 71: mod_base = m5c
  modified_base 97: mod_base = m5c
  modified_base 102: mod_base = m5c
  modified_base 135: mod_base = m5c
  modified_base 142: mod_base = m5c
  modified_base 174: mod_base = m5c
  modified_base 201: mod_base = m5c
  modified_base 229: mod_base = m5c
  modified_base 251: mod_base = m5c
  modified_base 258: mod_base = m5c
  modified_base 271: mod_base = m5c
  variation 149: note = CpG site, residue is C if methylated or T(=U) if unmethylated
taatgagttttgatattttttatgttattttaatttgttttttaaaattattgggtacggtttatttattcgatttttatatttttttataggtttcgtttcgggtaggaagggaatagtaggttttggattgtcgggttacgggttgygtttttttttttgtgttagatgagcggttaagtgttttgtaaagggttttacgattttttttatttgtttaggtttattcgatattgttattaattgaattcgaggatcggaatttttttacgtagttgtgggtagtagaataatggtttt

SEQ ID NO: 329 - DNA, 300 bp, synthetic construct
  source 1..300: mol_type = other DNA
  modified_base 2: mod_base = OTHER; note = uracil
  modified_base 5..6: mod_base = OTHER; note = uracil
  modified_base 8: mod_base = OTHER; note = uracil
  modified_base 10..11: mod_base = OTHER; note = uracil
  modified_base 17: mod_base = OTHER; note = uracil
  modified_base 25: mod_base = OTHER; note = uracil
  modified_base 34..36: mod_base = OTHER; note = uracil
  modified_base 47..49: mod_base = OTHER; note = uracil
  modified_base 59..61: mod_base = OTHER; note = uracil
  modified_base 69: mod_base = OTHER; note = uracil
  modified_base 76: mod_base = OTHER; note = uracil
  modified_base 86..87: mod_base = OTHER; note = uracil
  modified_base 89..91: mod_base = OTHER; note = uracil
  modified_base 105: mod_base = OTHER; note = uracil
  modified_base 115..117: mod_base = OTHER; note = uracil
  modified_base 127: mod_base = OTHER; note = uracil
  modified_base 138..139: mod_base = OTHER; note = uracil
  modified_base 141..142: mod_base = OTHER; note = uracil
  modified_base 150: mod_base = OTHER; note = uracil
  modified_base 154: mod_base = OTHER; note = uracil
  modified_base 157..159: mod_base = OTHER; note = uracil
  modified_base 164: mod_base = OTHER; note = uracil
  modified_base 171..174: mod_base = OTHER; note = uracil
  modified_base 196: mod_base = OTHER; note = uracil
  modified_base 199: mod_base = OTHER; note = uracil
  modified_base 203: mod_base = OTHER; note = uracil
  modified_base 211..213: mod_base = OTHER; note = uracil
  modified_base 216..217: mod_base = OTHER; note = uracil
  modified_base 221: mod_base = OTHER; note = uracil
  modified_base 227: mod_base = OTHER; note = uracil
  modified_base 236: mod_base = OTHER; note = uracil
  modified_base 242: mod_base = OTHER; note = uracil
  modified_base 258..259: mod_base = OTHER; note = uracil
  modified_base 262..263: mod_base = OTHER; note = uracil
  modified_base 271: mod_base = OTHER; note = uracil
  modified_base 283: mod_base = OTHER; note = uracil
  modified_base 286: mod_base = OTHER; note = uracil
  modified_base 291..292: mod_base = OTHER; note = uracil
  modified_base 298: mod_base = OTHER; note = uracil
  modified_base 14: mod_base = m5c
  modified_base 18: mod_base = m5c
  modified_base 23: mod_base = m5c
  modified_base 62: mod_base = m5c
  modified_base 81: mod_base = m5c
  modified_base 99: mod_base = m5c
  modified_base 108: mod_base = m5c
  modified_base 113: mod_base = m5c
  modified_base 128: mod_base = m5c
  modified_base 200: mod_base = m5c
  modified_base 275: mod_base = m5c
  variation 151: note = CpG site, residue is C if methylated or T(=U) if unmethylated
  variation 182: note = CpG site, residue is C if methylated or T(=U) if unmethylated
  variation 192: note = CpG site, residue is C if methylated or T(=U) if unmethylated
gtatttttatttgcgttcgaagcgtagatggagtttaagggaaaggttttgtagaggatttcgtgtgatttggggtaaagcgtggttttttaggggtgcgtgggtagcgggacgtttatggtgtgatcgggtttgtgtttttatagggatygtttgttttgtgtagagagtttttgtggggygggaagtggygagtagtcggtaaggaggtttagttagatagaagtaggggggttagggatatgggaggtgggggattagttagtgagttagacgtgaggattttagtgttaaggattg

SEQ ID NO: 330 - DNA, 300 bp, synthetic construct
  source 1..300: mol_type = other DNA
  modified_base 1: mod_base = OTHER; note = uracil
  modified_base 5..6: mod_base = OTHER; note = uracil
  modified_base 11: mod_base = OTHER; note = uracil
  modified_base 13: mod_base = OTHER; note = uracil
  modified_base 20..21: mod_base = OTHER; note = uracil
  modified_base 23: mod_base = OTHER; note = uracil
  modified_base 28: mod_base = OTHER; note = uracil
  modified_base 32: mod_base = OTHER; note = uracil
  modified_base 34: mod_base = OTHER; note = uracil
  modified_base 36: mod_base = OTHER; note = uracil
  modified_base 40: mod_base = OTHER; note = uracil
  modified_base 45..49: mod_base = OTHER; note = uracil
  modified_base 51..52: mod_base = OTHER; note = uracil
  modified_base 54..56: mod_base = OTHER; note = uracil
  modified_base 61..63: mod_base = OTHER; note = uracil
  modified_base 67..72: mod_base = OTHER; note = uracil
  modified_base 75: mod_base = OTHER; note = uracil
  modified_base 78: mod_base = OTHER; note = uracil
  modified_base 82: mod_base = OTHER; note = uracil
  modified_base 86: mod_base = OTHER; note = uracil
  modified_base 91..92: mod_base = OTHER; note = uracil
  modified_base 94..95: mod_base = OTHER; note = uracil
  modified_base 99: mod_base = OTHER; note = uracil
  modified_base 103: mod_base = OTHER; note = uracil
  modified_base 106: mod_base = OTHER; note = uracil
  modified_base 110..111: mod_base = OTHER; note = uracil
  modified_base 113: mod_base = OTHER; note = uracil
  modified_base 116..117: mod_base = OTHER; note = uracil
  modified_base 120..123: mod_base = OTHER; note = uracil
  modified_base 125: mod_base = OTHER; note = uracil
  modified_base 131: mod_base = OTHER; note = uracil
  modified_base 133: mod_base = OTHER; note = uracil
  modified_base 135: mod_base = OTHER; note = uracil
  modified_base 138: mod_base = OTHER; note = uracil
  modified_base 140: mod_base = OTHER; note = uracil
  modified_base 145: mod_base = OTHER; note = uracil
  modified_base 153..155: mod_base = OTHER; note = uracil
  modified_base 164: mod_base = OTHER; note = uracil
  modified_base 166: mod_base = OTHER; note = uracil
  modified_base 170..171: mod_base = OTHER; note = uracil
  modified_base 176: mod_base = OTHER; note = uracil
  modified_base 178: mod_base = OTHER; note = uracil
  modified_base 180..181: mod_base = OTHER; note = uracil
  modified_base 190..191: mod_base = OTHER; note = uracil
  modified_base 194: mod_base = OTHER; note = uracil
  modified_base 197..199: mod_base = OTHER; note = uracil
  modified_base 203: mod_base = OTHER; note = uracil
  modified_base 205..208: mod_base = OTHER; note = uracil
  modified_base 216..217: mod_base = OTHER; note = uracil
  modified_base 221: mod_base = OTHER; note = uracil
  modified_base 226..229: mod_base = OTHER; note = uracil
  modified_base 234: mod_base = OTHER; note = uracil
  modified_base 236: mod_base = OTHER; note = uracil
  modified_base 244..245: mod_base = OTHER; note = uracil
  modified_base 247: mod_base = OTHER; note = uracil
  modified_base 250: mod_base = OTHER; note = uracil
  modified_base 255..256: mod_base = OTHER; note = uracil
  modified_base 260..262: mod_base = OTHER; note = uracil
  modified_base 268: mod_base = OTHER; note = uracil
  modified_base 270..271: mod_base = OTHER; note = uracil
  modified_base 274: mod_base = OTHER; note = uracil
  modified_base 279: mod_base = OTHER; note = uracil
  modified_base 288: mod_base = OTHER; note = uracil
  modified_base 300: mod_base = OTHER; note = uracil
  modified_base 25: mod_base = m5c
  modified_base 100: mod_base = m5c
  modified_base 172: mod_base = m5c
  modified_base 187: mod_base = m5c
  modified_base 192: mod_base = m5c
  modified_base 201: mod_base = m5c
  modified_base 219: mod_base = m5c
  modified_base 238: mod_base = m5c
  modified_base 277: mod_base = m5c
  modified_base 282: mod_base = m5c
  modified_base 286: mod_base = m5c
  variation 108: note = CpG site, residue is C if methylated or T(=U) if unmethylated
  variation 118: note = CpG site, residue is C if methylated or T(=U) if unmethylated
  variation 149: note = CpG site, residue is C if methylated or T(=U) if unmethylated
tagtttttggtattgaagtttttacgtttgatttattggttggttttttattttttatgtttttgatttttttgtttttgtttggttgggtttttttgtcggttgttygttatttttygttttataggggttttttgtatagggtagayggtttttatggaggtataaattcggttatattatgggcgtttcgttgtttacgtatttttgggaggttacgttttgttttaagttatacggggttttttatagggttttttttttgggttttatttgcgtttcggacgtaggtgaggatgt

SEQ ID NO: 331 - DNA, 300 bp, synthetic construct
  source 1..300: mol_type = other DNA
  modified_base 6..9: mod_base = OTHER; note = uracil
  modified_base 12..13: mod_base = OTHER; note = uracil
  modified_base 17: mod_base = OTHER; note = uracil
  modified_base 19..21: mod_base = OTHER; note = uracil
  modified_base 27: mod_base = OTHER; note = uracil
  modified_base 29..30: mod_base = OTHER; note = uracil
  modified_base 42..43: mod_base = OTHER; note = uracil
  modified_base 49..51: mod_base = OTHER; note = uracil
  modified_base 53: mod_base = OTHER; note = uracil
  modified_base 57: mod_base = OTHER; note = uracil
  modified_base 59..60: mod_base = OTHER; note = uracil
  modified_base 65..66: mod_base = OTHER; note = uracil
  modified_base 68: mod_base = OTHER; note = uracil
  modified_base 71: mod_base = OTHER; note = uracil
  modified_base 74: mod_base = OTHER; note = uracil
  modified_base 80: mod_base = OTHER; note = uracil
  modified_base 95..96: mod_base = OTHER; note = uracil
  modified_base 103..104: mod_base = OTHER; note = uracil
  modified_base 112: mod_base = OTHER; note = uracil
  modified_base 114: mod_base = OTHER; note = uracil
  modified_base 119: mod_base = OTHER; note = uracil
  modified_base 121: mod_base = OTHER; note = uracil
  modified_base 128: mod_base = OTHER; note = uracil
  modified_base 136..137: mod_base = OTHER; note = uracil
  modified_base 144..146: mod_base = OTHER; note = uracil
  modified_base 149: mod_base = OTHER; note = uracil
  modified_base 152: mod_base = OTHER; note = uracil
  modified_base 155: mod_base = OTHER; note = uracil
  modified_base 157: mod_base = OTHER; note = uracil
  modified_base 160: mod_base = OTHER; note = uracil
  modified_base 162: mod_base = OTHER; note = uracil
  modified_base 164..165: mod_base = OTHER; note = uracil
  modified_base 167..168: mod_base = OTHER; note = uracil
  modified_base 172: mod_base = OTHER; note = uracil
  modified_base 176: mod_base = OTHER; note = uracil
  modified_base 181..183: mod_base = OTHER; note = uracil
  modified_base 188: mod_base = OTHER; note = uracil
  modified_base 205: mod_base = OTHER; note = uracil
  modified_base 211: mod_base = OTHER; note = uracil
  modified_base 216..217: mod_base = OTHER; note = uracil
  modified_base 219: mod_base = OTHER; note = uracil
  modified_base 224: mod_base = OTHER; note = uracil
  modified_base 233: mod_base = OTHER; note = uracil
  modified_base 236: mod_base = OTHER; note = uracil
  modified_base 241: mod_base = OTHER; note = uracil
  modified_base 245: mod_base = OTHER; note = uracil
  modified_base 248: mod_base = OTHER; note = uracil
  modified_base 251: mod_base = OTHER; note = uracil
  modified_base 257: mod_base = OTHER; note = uracil
  modified_base 259..260: mod_base = OTHER; note = uracil
  modified_base 263: mod_base = OTHER; note = uracil
  modified_base 268..269: mod_base = OTHER; note = uracil
  modified_base 271..272: mod_base = OTHER; note = uracil
  modified_base 278..281: mod_base = OTHER; note = uracil
  modified_base 296: mod_base = OTHER; note = uracil
  modified_base 298..299: mod_base = OTHER; note = uracil
  modified_base 22: mod_base = m5c
  modified_base 82: mod_base = m5c
  modified_base 88: mod_base = m5c
  modified_base 98: mod_base = m5c
  modified_base 138: mod_base = m5c
  modified_base 173: mod_base = m5c
  modified_base 179: mod_base = m5c
  modified_base 196: mod_base = m5c
  modified_base 227: mod_base = m5c
  modified_base 288: mod_base = m5c
  modified_base 294: mod_base = m5c
  variation 150: note = CpG site, residue is C if methylated or T(=U) if unmethylated
aggttttttattttagtttttcggatttttatagggagtgtttagggatttttaatttttagggttatttttgtaggagttcgggttcgaggttttacgtggttagaagagtttaggtttttgagggttggtgtgttcgggtatttattygtattattgttttttttttgttcggttacgtttagggttgagtgacggtggtggtaagtgtttgtttttagggtagcgaggttttttgttttgatagtagtagggatttttttatggttattagtaattttagtgggcggaggcgttttt

SEQ ID NO: 332 - DNA, 300 bp, synthetic construct
  source 1..300: mol_type = other DNA
  modified_base 8..9: mod_base = OTHER; note = uracil
  modified_base 11: mod_base = OTHER; note = uracil
  modified_base 14..16: mod_base = OTHER; note = uracil
  modified_base 18: mod_base = OTHER; note = uracil
  modified_base 27: mod_base = OTHER; note = uracil
  modified_base 34..35: mod_base = OTHER; note = uracil
  modified_base 46..48: mod_base = OTHER; note = uracil
  modified_base 51: mod_base = OTHER; note = uracil
  modified_base 54: mod_base = OTHER; note = uracil
  modified_base 58: mod_base = OTHER; note = uracil
  modified_base 63: mod_base = OTHER; note = uracil
  modified_base 70..71: mod_base = OTHER; note = uracil
  modified_base 75: mod_base = OTHER; note = uracil
  modified_base 78..80: mod_base = OTHER; note = uracil
  modified_base 87: mod_base = OTHER; note = uracil
  modified_base 91: mod_base = OTHER; note = uracil
  modified_base 93: mod_base = OTHER; note = uracil
  modified_base 97..98: mod_base = OTHER; note = uracil
  modified_base 100..101: mod_base = OTHER; note = uracil
  modified_base 103: mod_base = OTHER; note = uracil
  modified_base 107: mod_base = OTHER; note = uracil
  modified_base 109: mod_base = OTHER; note = uracil
  modified_base 111: mod_base = OTHER; note = uracil
  modified_base 114..116: mod_base = OTHER; note = uracil
  modified_base 126: mod_base = OTHER; note = uracil
  modified_base 131: mod_base = OTHER; note = uracil
  modified_base 142: mod_base = OTHER; note = uracil
  modified_base 160..161: mod_base = OTHER; note = uracil
  modified_base 166: mod_base = OTHER; note = uracil
  modified_base 168: mod_base = OTHER; note = uracil
  modified_base 170..171: mod_base = OTHER; note = uracil
  modified_base 174..176: mod_base = OTHER; note = uracil
  modified_base 178: mod_base = OTHER; note = uracil
  modified_base 184..185: mod_base = OTHER; note = uracil
  modified_base 190: mod_base = OTHER; note = uracil
  modified_base 192: mod_base = OTHER; note = uracil
  modified_base 195: mod_base = OTHER; note = uracil
  modified_base 199..200: mod_base = OTHER; note = uracil
  modified_base 209..210: mod_base = OTHER; note = uracil
  modified_base 216..217: mod_base = OTHER; note = uracil
  modified_base 222: mod_base = OTHER; note = uracil
  modified_base 224..225: mod_base = OTHER; note = uracil
  modified_base 228: mod_base = OTHER; note = uracil
  modified_base 237..239: mod_base = OTHER; note = uracil
  modified_base 254..256: mod_base = OTHER; note = uracil
  modified_base 261: mod_base = OTHER; note = uracil
  modified_base 263: mod_base = OTHER; note = uracil
  modified_base 265..267: mod_base = OTHER; note = uracil
  modified_base 277: mod_base = OTHER; note = uracil
  modified_base 285: mod_base = OTHER; note = uracil
  modified_base 298..299: mod_base = OTHER; note = uracil
  modified_base 6: mod_base = m5c
  modified_base 12: mod_base = m5c
  modified_base 73: mod_base = m5c
  modified_base 104: mod_base = m5c
  modified_base 121: mod_base = m5c
  modified_base 127: mod_base = m5c
  modified_base 162: mod_base = m5c
  modified_base 202: mod_base = m5c
  modified_base 212: mod_base = m5c
  modified_base 218: mod_base = m5c
  modified_base 278: mod_base = m5c
  variation 150: note = CpG site, residue is C if methylated or T(=U) if unmethylated
aggagcgttttcgtttattggggttattggtggttatgaaggagtttttgttgttgttagaatagaagatttcgttgttttgaggataagtatttgttattatcgttatttagttttgggcgtagtcggataggaggagagtagtgatgyggatgggtattcgggtatattagtttttagagatttgagtttttttggttacgtggaatttcgaattcgagtttttgtagaagtggttttggagattgagggtttttggatattttttatggagattcggggagttaggatggggaattt

SEQ ID NO: 333 - DNA, 300 bp, synthetic construct
  source 1..300: mol_type = other DNA
  modified_base 2..3: mod_base = OTHER; note = uracil
  modified_base 6..7: mod_base = OTHER; note = uracil
  modified_base 10: mod_base = OTHER; note = uracil
  modified_base 14..15: mod_base = OTHER; note = uracil
  modified_base 18: mod_base = OTHER; note = uracil
  modified_base 22: mod_base = OTHER; note = uracil
  modified_base 24: mod_base = OTHER; note = uracil
  modified_base 26: mod_base = OTHER; note = uracil
  modified_base 28: mod_base = OTHER; note = uracil
  modified_base 33: mod_base = OTHER; note = uracil
  modified_base 37: mod_base = OTHER; note = uracil
  modified_base 42: mod_base = OTHER; note = uracil
  modified_base 47: mod_base = OTHER; note = uracil
  modified_base 52: mod_base = OTHER; note = uracil
  modified_base 54: mod_base = OTHER; note = uracil
  modified_base 57: mod_base = OTHER; note = uracil
  modified_base 61: mod_base = OTHER; note = uracil
  modified_base 75: mod_base = OTHER; note = uracil
  modified_base 77: mod_base = OTHER; note = uracil
  modified_base 81: mod_base = OTHER; note = uracil
  modified_base 83: mod_base = OTHER; note = uracil
  modified_base 89..91: mod_base = OTHER; note = uracil
  modified_base 95: mod_base = OTHER; note = uracil
  modified_base 103: mod_base = OTHER; note = uracil
  modified_base 111..112: mod_base = OTHER; note = uracil
  modified_base 115: mod_base = OTHER; note = uracil
  modified_base 122: mod_base = OTHER; note = uracil
  modified_base 124: mod_base = OTHER; note = uracil
  modified_base 127: mod_base = OTHER; note = uracil
  modified_base 130..131: mod_base = OTHER; note = uracil
  modified_base 133..134: mod_base = OTHER; note = uracil
  modified_base 136..137: mod_base = OTHER; note = uracil
  modified_base 139..140: mod_base = OTHER; note = uracil
  modified_base 147: mod_base = OTHER; note = uracil
  modified_base 156: mod_base = OTHER; note = uracil
  modified_base 159: mod_base = OTHER; note = uracil
  modified_base 162..163: mod_base = OTHER; note = uracil
  modified_base 165: mod_base = OTHER; note = uracil
  modified_base 168..169: mod_base = OTHER; note = uracil
  modified_base 171..172: mod_base = OTHER; note = uracil
  modified_base 180: mod_base = OTHER; note = uracil
  modified_base 186: mod_base = OTHER; note = uracil
  modified_base 189: mod_base = OTHER; note = uracil
  modified_base 197: mod_base = OTHER; note = uracil
  modified_base 199: mod_base = OTHER; note = uracil
  modified_base 202..203: mod_base = OTHER; note = uracil
  modified_base 207..208: mod_base = OTHER; note = uracil
  modified_base 212: mod_base = OTHER; note = uracil
  modified_base 241: mod_base = OTHER; note = uracil
  modified_base 249: mod_base = OTHER; note = uracil
  modified_base 260: mod_base = OTHER; note = uracil
  modified_base 265: mod_base = OTHER; note = uracil
  modified_base 270: mod_base = OTHER; note = uracil
  modified_base 278: mod_base = OTHER; note = uracil
  modified_base 283..284: mod_base = OTHER; note = uracil
  modified_base 286: mod_base = OTHER; note = uracil
  modified_base 296..298: mod_base = OTHER; note = uracil
  modified_base 300: mod_base = OTHER; note = uracil
  modified_base 71: mod_base = m5c
  modified_base 87: mod_base = m5c
  modified_base 101: mod_base = m5c
  modified_base 109: mod_base = m5c
  modified_base 117: mod_base = m5c
  modified_base 120: mod_base = m5c
  modified_base 141: mod_base = m5c
  modified_base 173: mod_base = m5c
  modified_base 193: mod_base = m5c
  modified_base 195: mod_base = m5c
  modified_base 209: mod_base = m5c
  modified_base 251: mod_base = m5c
  modified_base 261: mod_base = m5c
  modified_base 290: mod_base = m5c
  modified_base 294: mod_base = m5c
  variation 151: note = CpG site, residue is C if methylated or T(=U) if unmethylated
tttttttttttttttttttttttttttttttttttttttttttttttttttttttttttttattttgagacgtattttggttttgtcgtttaggttggagcgtaatggcgttatttcggcgtattgtaatttttatttttcgggtttaagygattttattgttttagtttttcgagtagttgggattataggcgcgtattattaagttcggttaatttttttttgtatttttagtagagattgggttttacgatgttggtcgggttggtttggaagttttgattttaagcgtgcgttttt

SEQ ID NO: 334 - DNA, 300 bp, synthetic construct
  source 1..300: mol_type = other DNA
  modified_base 8: mod_base = OTHER; note = uracil
  modified_base 12: mod_base = OTHER; note = uracil
  modified_base 20: mod_base = OTHER; note = uracil
  modified_base 25: mod_base = OTHER; note = uracil
  modified_base 28..29: mod_base = OTHER; note = uracil
  modified_base 33..34: mod_base = OTHER; note = uracil
  modified_base 37..38: mod_base = OTHER; note = uracil
  modified_base 42..43: mod_base = OTHER; note = uracil
  modified_base 46: mod_base = OTHER; note = uracil
  modified_base 56..58: mod_base = OTHER; note = uracil
  modified_base 62: mod_base = OTHER; note = uracil
  modified_base 64: mod_base = OTHER; note = uracil
  modified_base 67: mod_base = OTHER; note = uracil
  modified_base 76: mod_base = OTHER; note = uracil
  modified_base 90: mod_base = OTHER; note = uracil
  modified_base 95: mod_base = OTHER; note = uracil
  modified_base 109..110: mod_base = OTHER; note = uracil
  modified_base 117..119: mod_base = OTHER; note = uracil
  modified_base 122: mod_base = OTHER; note = uracil
  modified_base 125: mod_base = OTHER; note = uracil
  modified_base 134: mod_base = OTHER; note = uracil
  modified_base 140: mod_base = OTHER; note = uracil
  modified_base 151: mod_base = OTHER; note = uracil
  modified_base 157..158: mod_base = OTHER; note = uracil
  modified_base 175: mod_base = OTHER; note = uracil
  modified_base 182: mod_base = OTHER; note = uracil
  modified_base 193..194: mod_base = OTHER; note = uracil
  modified_base 201: mod_base = OTHER; note = uracil
  modified_base 203..204: mod_base = OTHER; note = uracil
  modified_base 207..208: mod_base = OTHER; note = uracil
  modified_base 216: mod_base = OTHER; note = uracil
  modified_base 221..222: mod_base = OTHER; note = uracil
  modified_base 232: mod_base = OTHER; note = uracil
  modified_base 234: mod_base = OTHER; note = uracil
  modified_base 6: mod_base = m5c
  modified_base 10: mod_base = m5c
  modified_base 39: mod_base = m5c
  modified_base 49: mod_base = m5c
  modified_base 91: mod_base = m5c
  modified_base 105: mod_base = m5c
  modified_base 107: mod_base = m5c
  modified_base 127: mod_base = m5c
  modified_base 159: mod_base = m5c
  modified_base 180: mod_base = m5c
  modified_base 183: mod_base = m5c
  modified_base 191: mod_base = m5c
  modified_base 199: mod_base = m5c
  modified_base 213: mod_base = m5c
  modified_base 229: mod_base = m5c
  variation 149: note = CpG site, residue is C if methylated or T(=U) if unmethylated
gagggcgtacgtttgaggttaagatttttagattagttcggttaatatcgtgaaatttagtttttattaaaaatataaaaaaaaattagtcgggtttggtagtgcgcgtttgtagttttagttattcgggaggttgaggtagtagaatygtttgaattcgggaggtggaggttgtagtgcgtcgagatggcgttattgcgttttagtttgggcgatagagttagagtacgttttaaaatgaaagaagagaaaagaaaagaaaagaaagaaaagagagagaaagaaggaaagaaggaagga

SEQ ID NO: 335 - DNA, 300 bp, synthetic construct
  source 1..300: mol_type = other DNA
  modified_base 4..5: mod_base = OTHER; note = uracil
  modified_base 7: mod_base = OTHER; note = uracil
  modified_base 10: mod_base = OTHER; note = uracil
  modified_base 14..15: mod_base = OTHER; note = uracil
  modified_base 23: mod_base = OTHER; note = uracil
  modified_base 31..32: mod_base = OTHER; note = uracil
  modified_base 46: mod_base = OTHER; note = uracil
  modified_base 50: mod_base = OTHER; note = uracil
  modified_base 52: mod_base = OTHER; note = uracil
  modified_base 59..60: mod_base = OTHER; note = uracil
  modified_base 63: mod_base = OTHER; note = uracil
  modified_base 69: mod_base = OTHER; note = uracil
  modified_base 71: mod_base = OTHER; note = uracil
  modified_base 74: mod_base = OTHER; note = uracil
  modified_base 81: mod_base = OTHER; note = uracil
  modified_base 89: mod_base = OTHER; note = uracil
  modified_base 91: mod_base = OTHER; note = uracil
  modified_base 98: mod_base = OTHER; note = uracil
  modified_base 102..103: mod_base = OTHER; note = uracil
  modified_base 116: mod_base = OTHER; note = uracil
  modified_base 118: mod_base = OTHER; note = uracil
  modified_base 124: mod_base = OTHER; note = uracil
  modified_base 127..128: mod_base = OTHER; note = uracil
  modified_base 135: mod_base = OTHER; note = uracil
  modified_base 138..139: mod_base = OTHER; note = uracil
  modified_base 161: mod_base = OTHER; note = uracil
  modified_base 170: mod_base = OTHER; note = uracil
  modified_base 172: mod_base = OTHER; note = uracil
  modified_base 179: mod_base = OTHER; note = uracil
  modified_base 184..185: mod_base = OTHER; note = uracil
  modified_base 187: mod_base = OTHER; note = uracil
  modified_base 190..191: mod_base = OTHER; note = uracil
  modified_base 197: mod_base = OTHER; note = uracil
  modified_base 199..200: mod_base = OTHER; note = uracil
  modified_base 203: mod_base = OTHER; note = uracil
  modified_base 215: mod_base = OTHER; note = uracil
  modified_base 222: mod_base = OTHER; note = uracil
  modified_base 227: mod_base = OTHER; note = uracil
  modified_base 230: mod_base = OTHER; note = uracil
  modified_base 237: mod_base = OTHER; note = uracil
  modified_base 240: mod_base = OTHER; note = uracil
  modified_base 248: mod_base = OTHER; note = uracil
  modified_base 250..252: mod_base = OTHER; note = uracil
  modified_base 254: mod_base = OTHER; note = uracil
  modified_base 259: mod_base = OTHER; note = uracil
  modified_base 262: mod_base = OTHER; note = uracil
  modified_base 269..270: mod_base = OTHER; note = uracil
  modified_base 273..274: mod_base = OTHER; note = uracil
  modified_base 276..277: mod_base = OTHER; note = uracil
  modified_base 281: mod_base = OTHER; note = uracil
  modified_base 288: mod_base = OTHER; note = uracil
  modified_base 292: mod_base = OTHER; note = uracil
  modified_base 296: mod_base = OTHER; note = uracil
  modified_base 33: mod_base = m5c
  modified_base 64: mod_base = m5c
  modified_base 99: mod_base = m5c
  modified_base 108: mod_base = m5c
  modified_base 162: mod_base = m5c
  modified_base 193: mod_base = m5c
  modified_base 204: mod_base = m5c
  modified_base 210: mod_base = m5c
  modified_base 217: mod_base = m5c
  variation 151: note = CpG site, residue is C if methylated or T(=U) if unmethylated
aggtttttgttgatttgtagaatttgttgattcggattttgatgttagttttattgggtttgtcgttgttttttttgggatagaagatttttttgattcggttaattcggtagggtttaggggtatttaggttgttgtttttgatgtagtyggagtattttcggtagtgttttgggtataggtttttatttacgggtttttttcgtgggcgttttacgggattggatagtttgatgttgtagagaagtatttatttgatattaatgaattttttattttgtagtggttagttaggtatga

SEQ ID NO: 336 - DNA, 300 bp, synthetic construct
  source 1..300: mol_type = other DNA
  modified_base 2: mod_base = OTHER; note = uracil
  modified_base 6..7: mod_base = OTHER; note = uracil
  modified_base 11: mod_base = OTHER; note = uracil
  modified_base 15..16: mod_base = OTHER; note = uracil
  modified_base 18: mod_base = OTHER; note = uracil
  modified_base 21: mod_base = OTHER; note = uracil
  modified_base 35: mod_base = OTHER; note = uracil
  modified_base 44: mod_base = OTHER; note = uracil
  modified_base 54: mod_base = OTHER; note = uracil
  modified_base 57: mod_base = OTHER; note = uracil
  modified_base 59: mod_base = OTHER; note = uracil
  modified_base 62: mod_base = OTHER; note = uracil
  modified_base 65: mod_base = OTHER; note = uracil
  modified_base 68: mod_base = OTHER; note = uracil
  modified_base 72: mod_base = OTHER; note = uracil
  modified_base 76..77: mod_base = OTHER; note = uracil
  modified_base 81..82: mod_base = OTHER; note = uracil
  modified_base 92..94: mod_base = OTHER; note = uracil
  modified_base 105..106: mod_base = OTHER; note = uracil
  modified_base 119..120: mod_base = OTHER; note = uracil
  modified_base 125..127: mod_base = OTHER; note = uracil
  modified_base 132: mod_base = OTHER; note = uracil
  modified_base 134: mod_base = OTHER; note = uracil
  modified_base 137: mod_base = OTHER; note = uracil
  modified_base 146: mod_base = OTHER; note = uracil
  modified_base 148: mod_base = OTHER; note = uracil
  modified_base 152: mod_base = OTHER; note = uracil
  modified_base 155: mod_base = OTHER; note = uracil
  modified_base 158: mod_base = OTHER; note = uracil
  modified_base 164: mod_base = OTHER; note = uracil
  modified_base 167: mod_base = OTHER; note = uracil
  modified_base 170..171: mod_base = OTHER; note = uracil
  modified_base 178..181: mod_base = OTHER; note = uracil
  modified_base 186..188: mod_base = OTHER; note = uracil
  modified_base 191: mod_base = OTHER; note = uracil
  modified_base 200: mod_base = OTHER; note = uracil
  modified_base 206: mod_base = OTHER; note = uracil
  modified_base 215: mod_base = OTHER; note = uracil
  modified_base 218: mod_base = OTHER; note = uracil
  modified_base 222..224: mod_base = OTHER; note = uracil
  modified_base 233: mod_base = OTHER; note = uracil
  modified_base 239: mod_base = OTHER; note = uracil
  modified_base 243..245: mod_base = OTHER; note = uracil
  modified_base 253: mod_base = OTHER; note = uracil
  modified_base 257: mod_base = OTHER; note = uracil
  modified_base 260: mod_base = OTHER; note = uracil
  modified_base 266: mod_base = OTHER; note = uracil
  modified_base 272: mod_base = OTHER; note = uracil
  modified_base 275: mod_base = OTHER; note = uracil
  modified_base 281: mod_base = OTHER; note = uracil
  modified_base 284: mod_base = OTHER; note = uracil
  modified_base 289: mod_base = OTHER; note = uracil
  modified_base 292: mod_base = OTHER; note = uracil
  modified_base 298..299: mod_base = OTHER; note = uracil
  modified_base 83: mod_base = m5c
  modified_base 90: mod_base = m5c
  modified_base 96: mod_base = m5c
  modified_base 107: mod_base = m5c
  modified_base 138: mod_base = m5c
  modified_base 192: mod_base = m5c
  modified_base 201: mod_base = m5c
  modified_base 236: mod_base = m5c
  modified_base 267: mod_base = m5c
  variation 149: note = CpG site, residue is C if methylated or T(=U) if unmethylated
ttatgtttgattgattattgtaaggtggaaggtttattgatgttaagtgggtgtttttttgtagtattaagttgtttagtttcgtgaaacgtttacggaaggagttcgtggatgaggatttgtatttagagtattatcggaaatatttygattatattaaaggtagtaatttggatgtttttgagttttatcgaattggtcggattaaagagattttttgttttaagaagagtaacggtaggtttaatgagattgatattaaaattcgggttaataagttttataggttagtagaggttt

SEQ ID NO: 337 - DNA, 300 bp, synthetic construct
  source 1..300: mol_type = other DNA
  modified_base 15: mod_base = OTHER; note = uracil
  modified_base 28: mod_base = OTHER; note = uracil
  modified_base 33..34: mod_base = OTHER; note = uracil
  modified_base 39: mod_base = OTHER; note = uracil
  modified_base 42..43: mod_base = OTHER; note = uracil
  modified_base 51: mod_base = OTHER; note = uracil
  modified_base 59: mod_base = OTHER; note = uracil
  modified_base 63: mod_base = OTHER; note = uracil
  modified_base 68: mod_base = OTHER; note = uracil
  modified_base 72: mod_base = OTHER; note = uracil
  modified_base 79: mod_base = OTHER; note = uracil
  modified_base 82..83: mod_base = OTHER; note = uracil
  modified_base 87: mod_base = OTHER; note = uracil
  modified_base 90: mod_base = OTHER; note = uracil
  modified_base 100: mod_base = OTHER; note = uracil
  modified_base 108: mod_base = OTHER; note = uracil
  modified_base 115: mod_base = OTHER; note = uracil
  modified_base 117..118: mod_base = OTHER; note = uracil
  modified_base 122: mod_base = OTHER; note = uracil
  modified_base 132: mod_base = OTHER; note = uracil
  modified_base 137..138: mod_base = OTHER; note = uracil
  modified_base 145: mod_base = OTHER; note = uracil
  modified_base 156: mod_base = OTHER; note = uracil
  modified_base 165: mod_base = OTHER; note = uracil
  modified_base 170: mod_base = OTHER; note = uracil
  modified_base 175: mod_base = OTHER; note = uracil
  modified_base 197: mod_base = OTHER; note = uracil
  modified_base 202: mod_base = OTHER; note = uracil
  modified_base 206: mod_base = OTHER; note = uracil
  modified_base 217..219: mod_base = OTHER; note = uracil
  modified_base 239..240: mod_base = OTHER; note = uracil
  modified_base 244: mod_base = OTHER; note = uracil
  modified_base 248..249: mod_base = OTHER; note = uracil
  modified_base 253: mod_base = OTHER; note = uracil
  modified_base 265: mod_base = OTHER; note = uracil
  modified_base 270: mod_base = OTHER; note = uracil
  modified_base 276: mod_base = OTHER; note = uracil
  modified_base 281: mod_base = OTHER; note = uracil
  modified_base 284..285: mod_base = OTHER; note = uracil
  modified_base 290: mod_base = OTHER; note = uracil
  modified_base 298: mod_base = OTHER; note = uracil
  modified_base 5: mod_base = m5c
  modified_base 12: mod_base = m5c
  modified_base 16: mod_base = m5c
  modified_base 22: mod_base = m5c
  modified_base 25: mod_base = m5c
  modified_base 73: mod_base = m5c
  modified_base 84: mod_base = m5c
  modified_base 88: mod_base = m5c
  modified_base 101: mod_base = m5c
  modified_base 110: mod_base = m5c
  modified_base 161: mod_base = m5c
  modified_base 183: mod_base = m5c
  modified_base 198: mod_base = m5c
  modified_base 203: mod_base = m5c
  modified_base 211: mod_base = m5c
  modified_base 258: mod_base = m5c
  modified_base 294: mod_base = m5c
  variation 151: note = CpG site, residue is C if methylated or T(=U) if unmethylated
ggggcggggttcggtcgggggcggcggtaggatttgagtagttaggagggttgggggatagttaggttaggtcggtggttattcggtcgttggagagggtcggatggtacgtggtattaagtaaaaggaggttgagttagaaagtagggayggggttagacgagtaaagttgggtaggagggcgagttgggaggggtcgagtcggttgtgcgtggttttttgggaggagggggtgtggttaagtaagttaaatagttcggaggttagtgtaaggataagatagtttgggtaaacgagtag

SEQ ID NO: 338 - DNA, 300 bp, synthetic construct
  source 1..300: mol_type = other DNA
  modified_base 1: mod_base = OTHER; note = uracil
  modified_base 4: mod_base = OTHER; note = uracil
  modified_base 12..14: mod_base = OTHER; note = uracil
  modified_base 18: mod_base = OTHER; note = uracil
  modified_base 22: mod_base = OTHER; note = uracil
  modified_base 27..28: mod_base = OTHER; note = uracil
  modified_base 32: mod_base = OTHER; note = uracil
  modified_base 34: mod_base = OTHER; note = uracil
  modified_base 38..39: mod_base = OTHER; note = uracil
  modified_base 41: mod_base = OTHER; note = uracil
  modified_base 46: mod_base = OTHER; note = uracil
  modified_base 54: mod_base = OTHER; note = uracil
  modified_base 58: mod_base = OTHER; note = uracil
  modified_base 63..64: mod_base = OTHER; note = uracil
  modified_base 66: mod_base = OTHER; note = uracil
  modified_base 68..72: mod_base = OTHER; note = uracil
  modified_base 74..75: mod_base = OTHER; note = uracil
  modified_base 77..79: mod_base = OTHER; note = uracil
  modified_base 86..87: mod_base = OTHER; note = uracil
  modified_base 91: mod_base = OTHER; note = uracil
  modified_base 93: mod_base = OTHER; note = uracil
  modified_base 96: mod_base = OTHER; note = uracil
  modified_base 100: mod_base = OTHER; note = uracil
  modified_base 105..108: mod_base = OTHER; note = uracil
  modified_base 110..112: mod_base = OTHER; note = uracil
  modified_base 115: mod_base = OTHER; note = uracil
  modified_base 119..121: mod_base = OTHER; note = uracil
  modified_base 123..124: mod_base = OTHER; note = uracil
  modified_base 127..129: mod_base = OTHER; note = uracil
  modified_base 132: mod_base = OTHER; note = uracil
  modified_base 137: mod_base = OTHER; note = uracil
  modified_base 142: mod_base = OTHER; note = uracil
  modified_base 146..148: mod_base = OTHER; note = uracil
  modified_base 152..154: mod_base = OTHER; note = uracil
  modified_base 157: mod_base = OTHER; note = uracil
  modified_base 161: mod_base = OTHER; note = uracil
  modified_base 165: mod_base = OTHER; note = uracil
  modified_base 167: mod_base = OTHER; note = uracil
  modified_base 170..171: mod_base = OTHER; note = uracil
  modified_base 173..174: mod_base = OTHER; note = uracil
  modified_base 180: mod_base = OTHER; note = uracil
  modified_base 187..188: mod_base = OTHER; note = uracil
  modified_base 194..195: mod_base = OTHER; note = uracil
  modified_base 198: mod_base = OTHER; note = uracil
  modified_base 202..204: mod_base = OTHER; note = uracil
  modified_base 206: mod_base = OTHER; note = uracil
  modified_base 208..209: mod_base = OTHER; note = uracil
  modified_base 215: mod_base = OTHER; note = uracil
  modified_base 223..224: mod_base = OTHER; note = uracil
  modified_base 226: mod_base = OTHER; note = uracil
  modified_base 230..231: mod_base = OTHER; note = uracil
  modified_base 235..236: mod_base = OTHER; note = uracil
  modified_base 240: mod_base = OTHER; note = uracil
  modified_base 244..248: mod_base = OTHER; note = uracil
  modified_base 251..253: mod_base = OTHER; note = uracil
  modified_base 255..256: mod_base = OTHER; note = uracil
  modified_base 260: mod_base = OTHER; note = uracil
  modified_base 263: mod_base = OTHER; note = uracil
  modified_base 265: mod_base = OTHER; note = uracil
  modified_base 270..271: mod_base = OTHER; note = uracil
  modified_base 274: mod_base = OTHER; note = uracil
  modified_base 277: mod_base = OTHER; note = uracil
  modified_base 280..283: mod_base = OTHER; note = uracil
  modified_base 287: mod_base = OTHER; note = uracil
  modified_base 292..294: mod_base = OTHER; note = uracil
  modified_base 297..300: mod_base = OTHER; note = uracil
  modified_base 6: mod_base = m5c
  modified_base 42: mod_base = m5c
  modified_base 89: mod_base = m5c
  modified_base 97: mod_base = m5c
  modified_base 102: mod_base = m5c
  modified_base 117: mod_base = m5c
  modified_base 139: mod_base = m5c
  modified_base 190: mod_base = m5c
  modified_base 199: mod_base = m5c
  modified_base 212: mod_base = m5c
  modified_base 216: mod_base = m5c
  modified_base 227: mod_base = m5c
  modified_base 275: mod_base = m5c
  modified_base 278: mod_base = m5c
  modified_base 284: mod_base = m5c
  modified_base 288: mod_base = m5c
  modified_base 295: mod_base = m5c
  variation 149: note = CpG site, residue is C if methylated or T(=U) if unmethylated
ttgttcgtttgtttaggttgttttgtttttgtattgattttcgaattgtttggtttgtttggttatattttttttttttaagggattacgtatagtcggttcggttttttttaattcgtttttttgtttagttttgttcgtttagtttygtttttgttttttggtttagtttttttttgtttggtgttacgtgttattcggttttttttagcggtcgggtagttatcggtttgatttgattgttttttagtttttttggttgtttaggttttgtcgtcgttttcggtcgaatttcgtttt

SEQ ID NO: 339 - DNA, 300 bp, synthetic construct
  source 1..300: mol_type = other DNA
  modified_base 15: mod_base = OTHER; note = uracil
  modified_base 20: mod_base = OTHER; note = uracil
  modified_base 24: mod_base = OTHER; note = uracil
  modified_base 35..37: mod_base = OTHER; note = uracil
  modified_base 57..58: mod_base = OTHER; note = uracil
  modified_base 62: mod_base = OTHER; note = uracil
  modified_base 66..67: mod_base = OTHER; note = uracil
  modified_base 71: mod_base = OTHER; note = uracil
  modified_base 83: mod_base = OTHER; note = uracil
  modified_base 88: mod_base = OTHER; note = uracil
  modified_base 94: mod_base = OTHER; note = uracil
  modified_base 99: mod_base = OTHER; note = uracil
  modified_base 102..103: mod_base = OTHER; note = uracil
  modified_base 108: mod_base = OTHER; note = uracil
  modified_base 116: mod_base = OTHER; note = uracil
  modified_base 135: mod_base = OTHER; note = uracil
  modified_base 139: mod_base = OTHER; note = uracil
  modified_base 142: mod_base = OTHER; note = uracil
  modified_base 144: mod_base = OTHER; note = uracil
  modified_base 152: mod_base = OTHER; note = uracil
  modified_base 154: mod_base = OTHER; note = uracil
  modified_base 158..159: mod_base = OTHER; note = uracil
  modified_base 162..164: mod_base = OTHER; note = uracil
  modified_base 168: mod_base = OTHER; note = uracil
  modified_base 183: mod_base = OTHER; note = uracil
  modified_base 187: mod_base = OTHER; note = uracil
  modified_base 189..190: mod_base = OTHER; note = uracil
  modified_base 196: mod_base = OTHER; note = uracil
  modified_base 207: mod_base = OTHER; note = uracil
  modified_base 211..212: mod_base = OTHER; note = uracil
  modified_base 215..216: mod_base = OTHER; note = uracil
  modified_base 220: mod_base = OTHER; note = uracil
  modified_base 225: mod_base = OTHER; note = uracil
  modified_base 228: mod_base = OTHER; note = uracil
  modified_base 240: mod_base = OTHER; note = uracil
  modified_base 243: mod_base = OTHER; note = uracil
  modified_base 246: mod_base = OTHER; note = uracil
  modified_base 251..252: mod_base = OTHER; note = uracil
  modified_base 255..256: mod_base = OTHER; note = uracil
  modified_base 262: mod_base = OTHER; note = uracil
  modified_base 267: mod_base = OTHER; note = uracil
  modified_base 273: mod_base = OTHER; note = uracil
  modified_base 281: mod_base = OTHER; note = uracil
  modified_base 289: mod_base = OTHER; note = uracil
  modified_base 292..294: mod_base = OTHER; note = uracil
  modified_base 300: mod_base = OTHER; note = uracil
  modified_base 1: mod_base = m5c
  modified_base 16: mod_base = m5c
  modified_base 21: mod_base = m5c
  modified_base 29: mod_base = m5c
  modified_base 76: mod_base = m5c
  modified_base 112: mod_base = m5c
  modified_base 122: mod_base = m5c
  modified_base 127: mod_base = m5c
  modified_base 145: mod_base = m5c
  modified_base 202: mod_base = m5c
  modified_base 208: mod_base = m5c
  modified_base 218: mod_base = m5c
  modified_base 233: mod_base = m5c
  modified_base 257: mod_base = m5c
  modified_base 268: mod_base = m5c
  modified_base 283: mod_base = m5c
  variation 150: note = CpG site, residue is C if methylated or T(=U) if unmethylated
cgagttgggaggggtcgagtcggttgtgcgtggttttttgggaggagggggtgtggttaagtaagttaaatagttcggaggttagtgtaaggataagatagtttgggtaaacgagtaggggcggagcgtgagagtagattgtatcggatygtttaggttagtttaagttgaagaggaaggggtaagttttagaagtaggggcggggtcgattaatttcgtagatttgttgggcgaagagtagtagttgggttagttcgatgttgtgtcggggtaggtagtttcggaggttgtttaggggt

SEQ ID NO: 340 - DNA, 300 bp, synthetic construct
  source 1..300: mol_type = other DNA
  modified_base 1..4: mod_base = OTHER; note = uracil
  modified_base 9: mod_base = OTHER; note = uracil
  modified_base 12..13: mod_base = OTHER; note = uracil
  modified_base 15: mod_base = OTHER; note = uracil
  modified_base 21: mod_base = OTHER; note = uracil
  modified_base 24..25: mod_base = OTHER; note = uracil
  modified_base 28..30: mod_base = OTHER; note = uracil
  modified_base 34: mod_base = OTHER; note = uracil
  modified_base 36: mod_base = OTHER; note = uracil
  modified_base 39: mod_base = OTHER; note = uracil
  modified_base 46: mod_base = OTHER; note = uracil
  modified_base 50..52: mod_base = OTHER; note = uracil
  modified_base 55: mod_base = OTHER; note = uracil
  modified_base 58: mod_base = OTHER; note = uracil
  modified_base 61: mod_base = OTHER; note = uracil
  modified_base 63: mod_base = OTHER; note = uracil
  modified_base 68..70: mod_base = OTHER; note = uracil
  modified_base 73: mod_base = OTHER; note = uracil
  modified_base 78: mod_base = OTHER; note = uracil
  modified_base 94..96: mod_base = OTHER; note = uracil
  modified_base 99..102: mod_base = OTHER; note = uracil
  modified_base 105: mod_base = OTHER; note = uracil
  modified_base 108: mod_base = OTHER; note = uracil
  modified_base 114: mod_base = OTHER; note = uracil
  modified_base 118..121: mod_base = OTHER; note = uracil
  modified_base 124..125: mod_base = OTHER; note = uracil
  modified_base 127: mod_base = OTHER; note = uracil
  modified_base 130: mod_base = OTHER; note = uracil
  modified_base 133: mod_base = OTHER; note = uracil
  modified_base 139: mod_base = OTHER; note = uracil
  modified_base 143..144: mod_base = OTHER; note = uracil
  modified_base 153: mod_base = OTHER; note = uracil
  modified_base 159: mod_base = OTHER; note = uracil
  modified_base 163: mod_base = OTHER; note = uracil
  modified_base 166: mod_base = OTHER; note = uracil
  modified_base 168: mod_base = OTHER; note = uracil
  modified_base 170: mod_base = OTHER; note = uracil
  modified_base 174: mod_base = OTHER; note = uracil
  modified_base 176: mod_base = OTHER; note = uracil
  modified_base 179..182: mod_base = OTHER; note = uracil
  modified_base 185: mod_base = OTHER; note = uracil
  modified_base 193..195: mod_base = OTHER; note = uracil
  modified_base 199: mod_base = OTHER; note = uracil
  modified_base 203: mod_base = OTHER; note = uracil
  modified_base 208..209: mod_base = OTHER; note = uracil
  modified_base 213: mod_base = OTHER; note = uracil
  modified_base 215: mod_base = OTHER; note = uracil
  modified_base 219..220: mod_base = OTHER; note = uracil
  modified_base 222: mod_base = OTHER; note = uracil
  modified_base 227: mod_base = OTHER; note = uracil
  modified_base 235: mod_base = OTHER; note = uracil
  modified_base 239: mod_base = OTHER; note = uracil
  modified_base 244..245: mod_base = OTHER; note = uracil
  modified_base 247: mod_base = OTHER; note = uracil
  modified_base 249..253: mod_base = OTHER; note = uracil
  modified_base 255..256: mod_base = OTHER; note = uracil
  modified_base 258..260: mod_base = OTHER; note = uracil
  modified_base 267..268: mod_base = OTHER; note = uracil
  modified_base 272: mod_base = OTHER; note = uracil
  modified_base 274: mod_base = OTHER; note = uracil
  modified_base 277: mod_base = OTHER; note = uracil
  modified_base 281: mod_base = OTHER; note = uracil
  modified_base 286..289: mod_base = OTHER; note = uracil
  modified_base 291..293: mod_base = OTHER; note = uracil
  modified_base 296: mod_base = OTHER; note = uracil
  modified_base 300: mod_base = OTHER; note = uracil
  modified_base 16: mod_base = m5c
  modified_base 31: mod_base = m5c
  modified_base 42: mod_base = m5c
  modified_base 66: mod_base = m5c
  modified_base 81: mod_base = m5c
  modified_base 91: mod_base = m5c
  modified_base 97: mod_base = m5c
  modified_base 154: mod_base = m5c
  modified_base 172: mod_base = m5c
  modified_base 177: mod_base = m5c
  modified_base 187: mod_base = m5c
  modified_base 223: mod_base = m5c
  modified_base 270: mod_base = m5c
  modified_base 278: mod_base = m5c
  modified_base 283: mod_base = m5c
  modified_base 298: mod_base = m5c
  variation 149: note = CpG site, residue is C if methylated or T(=U) if unmethylated
tttttgggtagttttcgagattatttgtttcggtatagtatcgggttggtttagttgttgtttttcgtttagtagatttgcgaggttggtcggtttcgtttttgtttttggagtttgtttttttttttttagtttgggttggtttgagygattcggtgtagtttgtttttacgtttcgtttttgttcgtttgtttaggttgttttgtttttgtattgattttcgaattgtttggtttgtttggttatattttttttttttaagggattacgtatagtcggttcggttttttttaattcgt

SEQ ID NO: 341 - DNA, 300 bp, synthetic construct
  source 1..300: mol_type = other DNA
  modified_base 3: mod_base = OTHER; note = uracil
  modified_base 7..9: mod_base = OTHER; note = uracil
  modified_base 13..14: mod_base = OTHER; note = uracil
  modified_base 20: mod_base = OTHER; note = uracil
  modified_base 31: mod_base = OTHER; note = uracil
  modified_base 33..35: mod_base = OTHER; note = uracil
  modified_base 38..40: mod_base = OTHER; note = uracil
  modified_base 46: mod_base = OTHER; note = uracil
  modified_base 49..51: mod_base = OTHER; note = uracil
  modified_base 53..56: mod_base = OTHER; note = uracil
  modified_base 61..62: mod_base = OTHER; note = uracil
  modified_base 67..68: mod_base = OTHER; note = uracil
  modified_base 74..76: mod_base = OTHER; note = uracil
  modified_base 82: mod_base = OTHER; note = uracil
  modified_base 86: mod_base = OTHER; note = uracil
  modified_base 93: mod_base = OTHER; note = uracil
  modified_base 99: mod_base = OTHER; note = uracil
  modified_base 101..105: mod_base = OTHER; note = uracil
  modified_base 107..109: mod_base = OTHER; note = uracil
  modified_base 111: mod_base = OTHER; note = uracil
  modified_base 113: mod_base = OTHER; note = uracil
  modified_base 122..123: mod_base = OTHER; note = uracil
  modified_base 125: mod_base = OTHER; note = uracil
  modified_base 129..130: mod_base = OTHER; note = uracil
  modified_base 138: mod_base = OTHER; note = uracil
  modified_base 141..142: mod_base = OTHER; note = uracil
  modified_base 147..148: mod_base = OTHER; note = uracil
  modified_base 152..153: mod_base = OTHER; note = uracil
  modified_base 157..160: mod_base = OTHER; note = uracil
  modified_base 167..168: mod_base = OTHER; note = uracil
  modified_base 170: mod_base = OTHER; note = uracil
  modified_base 178..179: mod_base = OTHER; note = uracil
  modified_base 186: mod_base = OTHER; note = uracil
  modified_base 193: mod_base = OTHER; note = uracil
  modified_base 202: mod_base = OTHER; note = uracil
  modified_base 209: mod_base = OTHER; note = uracil
  modified_base 215: mod_base = OTHER; note = uracil
  modified_base 224..227: mod_base = OTHER; note = uracil
  modified_base 229: mod_base = OTHER; note = uracil
  modified_base 240: mod_base = OTHER; note = uracil
  modified_base 245: mod_base = OTHER; note = uracil
  modified_base 247: mod_base = OTHER; note = uracil
  modified_base 257: mod_base = OTHER; note = uracil
  modified_base 261..262: mod_base = OTHER; note = uracil
  modified_base 265: mod_base = OTHER; note = uracil
  modified_base 267: mod_base = OTHER; note = uracil
  modified_base 271: mod_base = OTHER; note = uracil
  modified_base 283: mod_base = OTHER; note = uracil
  modified_base 288: mod_base = OTHER; note = uracil
  modified_base 291..293: mod_base = OTHER; note = uracil
  modified_base 295..297: mod_base = OTHER; note = uracil
  modified_base 300: mod_base = OTHER; note = uracil
  modified_base 44: mod_base = m5c
  modified_base 57: mod_base = m5c
  modified_base 89: mod_base = m5c
  modified_base 94: mod_base = m5c
  modified_base 139: mod_base = m5c
  modified_base 194: mod_base = m5c
  modified_base 217: mod_base = m5c
  modified_base 253: mod_base = m5c
  variation 150: note = CpG site, residue is C if methylated or T(=U) if unmethylated
aataggtttaagtttgtggtaggtgggggttatttagtttaggcgttttttattttcgggtttgggttagaagtttaggagttggttgcgggtcggtttttttttatttattttggggatgttttaggtttgggttttcgttttagtttygttaggttttaatgagtttttgtttggtttgtagttaattgatcggttggatttggggtaggtgttcgaggagttttattgagggagggtaggttttttgtgcgtattgtttagtatatataggaaatttagtatttttgtttatttagt

SEQ ID NO: 342 - DNA, 300 bp, synthetic construct
  source 1..300: mol_type = other DNA
  modified_base 2: mod_base = OTHER; note = uracil
  modified_base 11: mod_base = OTHER; note = uracil
  modified_base 19: mod_base = OTHER; note = uracil
  modified_base 27..28: mod_base = OTHER; note = uracil
  modified_base 37: mod_base = OTHER; note = uracil
  modified_base 42: mod_base = OTHER; note = uracil
  modified_base 49: mod_base = OTHER; note = uracil
  modified_base 51: mod_base = OTHER; note = uracil
  modified_base 58..59: mod_base = OTHER; note = uracil
  modified_base 62..64: mod_base = OTHER; note = uracil
  modified_base 66..68: mod_base = OTHER; note = uracil
  modified_base 70: mod_base = OTHER; note = uracil
  modified_base 78: mod_base = OTHER; note = uracil
  modified_base 80..81: mod_base = OTHER; note = uracil
  modified_base 87: mod_base = OTHER; note = uracil
  modified_base 89..90: mod_base = OTHER; note = uracil
  modified_base 93..96: mod_base = OTHER; note = uracil
  modified_base 101..102: mod_base = OTHER; note = uracil
  modified_base 105: mod_base = OTHER; note = uracil
  modified_base 110: mod_base = OTHER; note = uracil
  modified_base 117: mod_base = OTHER; note = uracil
  modified_base 120: mod_base = OTHER; note = uracil
  modified_base 124..125: mod_base = OTHER; note = uracil
  modified_base 129: mod_base = OTHER; note = uracil
  modified_base 135: mod_base = OTHER; note = uracil
  modified_base 137: mod_base = OTHER; note = uracil
  modified_base 145..146: mod_base = OTHER; note = uracil
  modified_base 155: mod_base = OTHER; note = uracil
  modified_base 167..169: mod_base = OTHER; note = uracil
  modified_base 173..174: mod_base = OTHER; note = uracil
  modified_base 180: mod_base = OTHER; note = uracil
  modified_base 183..186: mod_base = OTHER; note = uracil
  modified_base 205: mod_base = OTHER; note = uracil
  modified_base 209..210: mod_base = OTHER; note = uracil
  modified_base 213: mod_base = OTHER; note = uracil
  modified_base 216..217: mod_base = OTHER; note = uracil
  modified_base 220: mod_base = OTHER; note = uracil
  modified_base 222..223: mod_base = OTHER; note = uracil
  modified_base 228: mod_base = OTHER; note = uracil
  modified_base 231: mod_base = OTHER; note = uracil
  modified_base 235..237: mod_base = OTHER; note = uracil
  modified_base 241..242: mod_base = OTHER; note = uracil
  modified_base 258..259: mod_base = OTHER; note = uracil
  modified_base 264: mod_base = OTHER; note = uracil
  modified_base 272..276: mod_base = OTHER; note = uracil
  modified_base 278..279: mod_base = OTHER; note = uracil
  modified_base 282..283: mod_base = OTHER; note = uracil
  modified_base 285: mod_base = OTHER; note = uracil
  modified_base 289: mod_base = OTHER; note = uracil
  modified_base 295..296: mod_base = OTHER; note = uracil
  modified_base 47: mod_base = m5c
  modified_base 83: mod_base = m5c
  modified_base 106: mod_base = m5c
  modified_base 161: mod_base = m5c
  modified_base 206: mod_base = m5c
  modified_base 211: mod_base = m5c
  modified_base 243: mod_base = m5c
  modified_base 256: mod_base = m5c
  variation 150: note = CpG site, residue is C if methylated or T(=U) if unmethylated
gttgggtgggtagaaatgttaaattttttgtatgtgttggatagtacgtataagagatttgtttttttttagtggggtttttcgagtatttgttttaagtttaatcggttaattgattataggttaaatagaggtttattggggtttggygaggttaaggcggaaatttaggtttgaggtatttttagagtgggtgggggagaatcggttcgtagttagtttttgggtttttggtttaggttcgggggtgggaagcgtttgggttgggtgatttttatttgttataggtttgggtttgtt

SEQ ID NO: 343 - DNA, 300 bp, synthetic construct
  source 1..300: mol_type = other DNA
  modified_base 1..2: mod_base = OTHER; note = uracil
  modified_base 6..8: mod_base = OTHER; note = uracil
  modified_base 10..12: mod_base = OTHER; note = uracil
  modified_base 15: mod_base = OTHER; note = uracil
  modified_base 17: mod_base = OTHER; note = uracil
  modified_base 19..21: mod_base = OTHER; note = uracil
  modified_base 36: mod_base = OTHER; note = uracil
  modified_base 38: mod_base = OTHER; note = uracil
  modified_base 44..47: mod_base = OTHER; note = uracil
  modified_base 49: mod_base = OTHER; note = uracil
  modified_base 51: mod_base = OTHER; note = uracil
  modified_base 54: mod_base = OTHER; note = uracil
  modified_base 64: mod_base = OTHER; note = uracil
  modified_base 66: mod_base = OTHER; note = uracil
  modified_base 71: mod_base = OTHER; note = uracil
  modified_base 73..74: mod_base = OTHER; note = uracil
  modified_base 87..88: mod_base = OTHER; note = uracil
  modified_base 90..93: mod_base = OTHER; note = uracil
  modified_base 105: mod_base = OTHER; note = uracil
  modified_base 110: mod_base = OTHER; note = uracil
  modified_base 112: mod_base = OTHER; note = uracil
  modified_base 121..122: mod_base = OTHER; note = uracil
  modified_base 127..130: mod_base = OTHER; note = uracil
  modified_base 142..143: mod_base = OTHER; note = uracil
  modified_base 147: mod_base = OTHER; note = uracil
  modified_base 152: mod_base = OTHER; note = uracil
  modified_base 155..156: mod_base = OTHER; note = uracil
  modified_base 162: mod_base = OTHER; note = uracil
  modified_base 168: mod_base = OTHER; note = uracil
  modified_base 171: mod_base = OTHER; note = uracil
  modified_base 176..178: mod_base = OTHER; note = uracil
  modified_base 181..182: mod_base = OTHER; note = uracil
  modified_base 185: mod_base = OTHER; note = uracil
  modified_base 198: mod_base = OTHER; note = uracil
  modified_base 203: mod_base = OTHER; note = uracil
  modified_base 207..210: mod_base = OTHER; note = uracil
  modified_base 213..216: mod_base = OTHER; note = uracil
  modified_base 219..220: mod_base = OTHER; note = uracil
  modified_base 225..226: mod_base = OTHER; note = uracil
  modified_base 228: mod_base = OTHER; note = uracil
  modified_base 239: mod_base = OTHER; note = uracil
  modified_base 245..246: mod_base = OTHER; note = uracil
  modified_base 250..251: mod_base = OTHER; note = uracil
  modified_base 253: mod_base = OTHER; note = uracil
  modified_base 261: mod_base = OTHER; note = uracil
  modified_base 268: mod_base = OTHER; note = uracil
  modified_base 283: mod_base = OTHER; note = uracil
  modified_base 295: mod_base = OTHER; note = uracil
  modified_base 28: mod_base = m5c
  modified_base 52: mod_base = m5c
  modified_base 58: mod_base = m5c
  modified_base 75: mod_base = m5c
  modified_base 77: mod_base = m5c
  modified_base 80: mod_base = m5c
  modified_base 94: mod_base = m5c
  modified_base 96: mod_base = m5c
  modified_base 100: mod_base = m5c
  modified_base 123: mod_base = m5c
  modified_base 148: mod_base = m5c
  modified_base 169: mod_base = m5c
  modified_base 172: mod_base = m5c
  modified_base 186: mod_base = m5c
  modified_base 188: mod_base = m5c
  modified_base 204: mod_base = m5c
  modified_base 211: mod_base = m5c
  modified_base 217: mod_base = m5c
  modified_base 221: mod_base = m5c
  modified_base 240: mod_base = m5c
  modified_base 247: mod_base = m5c
  modified_base 254: mod_base = m5c
  variation 150: note = CpG site, residue is C if methylated or T(=U) if unmethylated
  variation 160: note = CpG site, residue is C if methylated or T(=U) if unmethylated
  variation 195: note = CpG site, residue is C if methylated or T(=U) if unmethylated
tttgatttatttaatttttttaggggacgtgggggtattggagttttatatcgtaggcggtagtttaatgtattcgcgtcggagtttttttttcgcgagcgtggtaaggtttagggaagtttcgggtttttggggagggggttttgtcgygtattttgtygtaggaatcgtcgggttttttttttcgcgggaagyggtttggtcgattttcgttttcgttcgggttttttgggggttttcggtgttcggttatcgtggggttggggattgaaagtgatgggattgaagatggggttggaa

SEQ ID NO: 344 - DNA, 300 bp, synthetic construct
  source 1..300: mol_type = other DNA
  modified_base 3..4: mod_base = OTHER; note = uracil
  modified_base 7..10: mod_base = OTHER; note = uracil
  modified_base 13: mod_base = OTHER; note = uracil
  modified_base 16: mod_base = OTHER; note = uracil
  modified_base 20..22: mod_base = OTHER; note = uracil
  modified_base 25: mod_base = OTHER; note = uracil
  modified_base 27: mod_base = OTHER; note = uracil
  modified_base 31: mod_base = OTHER; note = uracil
  modified_base 35..38: mod_base = OTHER; note = uracil
  modified_base 41..44: mod_base = OTHER; note = uracil
  modified_base 52: mod_base = OTHER; note = uracil
  modified_base 57: mod_base = OTHER; note = uracil
  modified_base 59: mod_base = OTHER; note = uracil
  modified_base 66..70: mod_base = OTHER; note = uracil
  modified_base 77..78: mod_base = OTHER; note = uracil
  modified_base 99..100: mod_base = OTHER; note = uracil
  modified_base 104: mod_base = OTHER; note = uracil
  modified_base 107: mod_base = OTHER; note = uracil
  modified_base 110..111: mod_base = OTHER; note = uracil
  modified_base 126..127: mod_base = OTHER; note = uracil
  modified_base 136..137: mod_base = OTHER; note = uracil
  modified_base 143: mod_base = OTHER; note = uracil
  modified_base 155: mod_base = OTHER; note = uracil
  modified_base 160..164: mod_base = OTHER; note = uracil
  modified_base 166..169: mod_base = OTHER; note = uracil
  modified_base 175..176: mod_base = OTHER; note = uracil
  modified_base 182: mod_base = OTHER; note = uracil
  modified_base 185..187: mod_base = OTHER; note = uracil
  modified_base 192..193: mod_base = OTHER; note = uracil
  modified_base 197..198: mod_base = OTHER; note = uracil
  modified_base 202: mod_base = OTHER; note = uracil
  modified_base 217: mod_base = OTHER; note = uracil
  modified_base 219: mod_base = OTHER; note = uracil
  modified_base 231: mod_base = OTHER; note = uracil
  modified_base 238: mod_base = OTHER; note = uracil
  modified_base 241: mod_base = OTHER; note = uracil
  modified_base 244..245: mod_base = OTHER; note = uracil
  modified_base 258: mod_base = OTHER; note = uracil
  modified_base 260..261: mod_base = OTHER; note = uracil
  modified_base 266..270: mod_base = OTHER; note = uracil
  modified_base 275..278: mod_base = OTHER; note = uracil
  modified_base 297: mod_base = OTHER; note = uracil
  modified_base 46: mod_base = m5c
  modified_base 53: mod_base = m5c
  modified_base 60: mod_base = m5c
  modified_base 79: mod_base = m5c
  modified_base 83: mod_base = m5c
  modified_base 89: mod_base = m5c
  modified_base 96: mod_base = m5c
  modified_base 112: mod_base = m5c
  modified_base 114: mod_base = m5c
  modified_base 128: mod_base = m5c
  modified_base 131: mod_base = m5c
  modified_base 152: mod_base = m5c
  modified_base 177: mod_base = m5c
  modified_base 200: mod_base = m5c
  modified_base 204: mod_base = m5c
  modified_base 206: mod_base = m5c
  modified_base 220: mod_base = m5c
  modified_base 223: mod_base = m5c
  modified_base 225: mod_base = m5c
  modified_base 242: mod_base = m5c
  modified_base 248: mod_base = m5c
  modified_base 272: mod_base = m5c
  variation 105: note = CpG site, residue is C if methylated or T(=U) if unmethylated
  variation 140: note = CpG site, residue is C if methylated or T(=U) if unmethylated
  variation 150: note = CpG site, residue is C if methylated or T(=U) if unmethylated
ttttagttttatttttagttttattatttttagtttttagttttacggtggtcgggtatcggaaatttttaagaggttcgggcgggggcgggggtcggttaagtygtttttcgcggaaggaagggttcggcggtttttgygataggatgygcggtaaggttttttttttaggggttcgggatttttttgagttttgttacgttcgcgggggaggaatttcgacgcgggtgtattgagttatcgtttgcggtgtggggttttagtgtttttacgttttttgggagagttgggtgggttagg

SEQ ID NO: 345 - DNA, 300 bp, synthetic construct
  source 1..300: mol_type = other DNA
  modified_base 4..5: mod_base = OTHER; note = uracil
  modified_base 36: mod_base = OTHER; note = uracil
  modified_base 41: mod_base = OTHER; note = uracil
  modified_base 43: mod_base = OTHER; note = uracil
  modified_base 56: mod_base = OTHER; note = uracil
  modified_base 70..71: mod_base = OTHER; note = uracil
  modified_base 74: mod_base = OTHER; note = uracil
  modified_base 81: mod_base = OTHER; note = uracil
  modified_base 83: mod_base = OTHER; note = uracil
  modified_base 98: mod_base = OTHER; note = uracil
  modified_base 102..103: mod_base = OTHER; note = uracil
  modified_base 117: mod_base = OTHER; note = uracil
  modified_base 119..120: mod_base = OTHER; note = uracil
  modified_base 122: mod_base = OTHER; note = uracil
  modified_base 128: mod_base = OTHER; note = uracil
  modified_base 133: mod_base = OTHER; note = uracil
  modified_base 136: mod_base = OTHER; note = uracil
  modified_base 140: mod_base = OTHER; note = uracil
  modified_base 143: mod_base = OTHER; note = uracil
  modified_base 159..160: mod_base = OTHER; note = uracil
  modified_base 165: mod_base = OTHER; note = uracil
  modified_base 171: mod_base = OTHER; note = uracil
  modified_base 175: mod_base = OTHER; note = uracil
  modified_base 205: mod_base = OTHER; note = uracil
  modified_base 216: mod_base = OTHER; note = uracil
  modified_base 223: mod_base = OTHER; note = uracil
  modified_base 225: mod_base = OTHER; note = uracil
  modified_base 231: mod_base = OTHER; note = uracil
  modified_base 259: mod_base = OTHER; note = uracil
  modified_base 273: mod_base = OTHER; note = uracil
  modified_base 284: mod_base = OTHER; note = uracil
  modified_base 291: mod_base = OTHER; note = uracil
  modified_base 293..294: mod_base = OTHER; note = uracil
  modified_base 296: mod_base = OTHER; note = uracil
  modified_base 300: mod_base = OTHER; note = uracil
  modified_base 30: mod_base = m5c
  modified_base 176: mod_base = m5c
  modified_base 203: mod_base = m5c
  modified_base 261: mod_base = m5c
  modified_base 274: mod_base = m5c
  modified_base 297: mod_base = m5c
  variation 151: note = CpG site, residue is C if methylated or T(=U) if unmethylated
tatttaaatgtgttttatataaaatgaatcgtttttagtgtattgaggaagttttttatttaaagaaattttgttgtgaatttttttgtgaagaatgtttttttaatggaattagttattattgagttatttttgtaaattttaggtttgyggttttgtttaagtaagatttggtcggagaagtgagataaattatagatgtcgttaataaattatagattatttaaaggtaaaagaggaaagaaaaaaaaaaattgattcgtgtatatgaatcgaattgagttaggggtttttatcggt

SEQ ID NO: 346 - DNA, 300 bp, synthetic construct
  source 1..300: mol_type = other DNA
  modified_base 2: mod_base = OTHER; note = uracil
  modified_base 12..15: mod_base = OTHER; note = uracil
  modified_base 19: mod_base = OTHER; note = uracil
  modified_base 21: mod_base = OTHER; note = uracil
  modified_base 31: mod_base = OTHER; note = uracil
  modified_base 37: mod_base = OTHER; note = uracil
  modified_base 44: mod_base = OTHER; note = uracil
  modified_base 58: mod_base = OTHER; note = uracil
  modified_base 62..63: mod_base = OTHER; note = uracil
  modified_base 65: mod_base = OTHER; note = uracil
  modified_base 71..72: mod_base = OTHER; note = uracil
  modified_base 83: mod_base = OTHER; note = uracil
  modified_base 100: mod_base = OTHER; note = uracil
  modified_base 103: mod_base = OTHER; note = uracil
  modified_base 114: mod_base = OTHER; note = uracil
  modified_base 116: mod_base = OTHER; note = uracil
  modified_base 118: mod_base = OTHER; note = uracil
  modified_base 121: mod_base = OTHER; note = uracil
  modified_base 123: mod_base = OTHER; note = uracil
  modified_base 127..128: mod_base = OTHER; note = uracil
  modified_base 133: mod_base = OTHER; note = uracil
  modified_base 137: mod_base = OTHER; note = uracil
  modified_base 143: mod_base = OTHER; note = uracil
  modified_base 148: mod_base = OTHER; note = uracil
  modified_base 151: mod_base = OTHER; note = uracil
  modified_base 155..156: mod_base = OTHER; note = uracil
  modified_base 166: mod_base = OTHER; note = uracil
  modified_base 175: mod_base = OTHER; note = uracil
  modified_base 177: mod_base = OTHER; note = uracil
  modified_base 186: mod_base = OTHER; note = uracil
  modified_base 192..193: mod_base = OTHER; note = uracil
  modified_base 204: mod_base = OTHER; note = uracil
  modified_base 208: mod_base = OTHER; note = uracil
  modified_base 211: mod_base = OTHER; note = uracil
  modified_base 213: mod_base = OTHER; note = uracil
  modified_base 223: mod_base = OTHER; note = uracil
  modified_base 225: mod_base = OTHER; note = uracil
  modified_base 228: mod_base = OTHER; note = uracil
  modified_base 236: mod_base = OTHER; note = uracil
  modified_base 250: mod_base = OTHER; note = uracil
  modified_base 253..254: mod_base = OTHER; note = uracil
  modified_base 256: mod_base = OTHER; note = uracil
  modified_base 261: mod_base = OTHER; note = uracil
  modified_base 263: mod_base = OTHER; note = uracil
  modified_base 275: mod_base = OTHER; note = uracil
  modified_base 289: mod_base = OTHER; note = uracil
  modified_base 291: mod_base = OTHER; note = uracil
  modified_base 3: mod_base = m5c
  modified_base 26: mod_base = m5c
  modified_base 39: mod_base = m5c
  modified_base 97: mod_base = m5c
  modified_base 124: mod_base = m5c
  modified_base 270: mod_base = m5c
  variation 149: note = CpG site, residue is C if methylated or T(=U) if unmethylated
gtcggtggagatttttgatttaattcggtttatatatacgagttaatttttttttttttttttttttttgtttttgagtaatttgtaatttattagcgatatttataatttattttattttttcggttagattttgtttaggtaaaatygtaaatttgaagtttgtagaaatgatttagtggtgattaattttattaggaaagtattttttataaaagagtttatagtaggatttttttaaatagaaaatttttttagtgtattgaaaacgatttattttatataaaatatatttggata

SEQ ID NO: 347 - DNA, 300 bp, synthetic construct
  source 1..300: mol_type = other DNA
  modified_base 9..10: mod_base = OTHER; note = uracil
  modified_base 21: mod_base = OTHER; note = uracil
  modified_base 25..26: mod_base = OTHER; note = uracil
  modified_base 33: mod_base = OTHER; note = uracil
  modified_base 39: mod_base = OTHER; note = uracil
  modified_base 44: mod_base = OTHER; note = uracil
  modified_base 46: mod_base = OTHER; note = uracil
  modified_base 49: mod_base = OTHER; note = uracil
  modified_base 52: mod_base = OTHER; note = uracil
  modified_base 54: mod_base = OTHER; note = uracil
  modified_base 59..60: mod_base = OTHER; note = uracil
  modified_base 66: mod_base = OTHER; note = uracil
  modified_base 71..72: mod_base = OTHER; note = uracil
  modified_base 74..77: mod_base = OTHER; note = uracil
  modified_base 81: mod_base = OTHER; note = uracil
  modified_base 90: mod_base = OTHER; note = uracil
  modified_base 96: mod_base = OTHER; note = uracil
  modified_base 101..103: mod_base = OTHER; note = uracil
  modified_base 107: mod_base = OTHER; note = uracil
  modified_base 114: mod_base = OTHER; note = uracil
  modified_base 119..120: mod_base = OTHER; note = uracil
  modified_base 122: mod_base = OTHER; note = uracil
  modified_base 129: mod_base = OTHER; note = uracil
  modified_base 132: mod_base = OTHER; note = uracil
  modified_base 139: mod_base = OTHER; note = uracil
  modified_base 142: mod_base = OTHER; note = uracil
  modified_base 144: mod_base = OTHER; note = uracil
  modified_base 146..147: mod_base = OTHER; note = uracil
  modified_base 149: mod_base = OTHER; note = uracil
  modified_base 152..153: mod_base = OTHER; note = uracil
  modified_base 155..156: mod_base = OTHER; note = uracil
  modified_base 160: mod_base = OTHER; note = uracil
  modified_base 165: mod_base = OTHER; note = uracil
  modified_base 171..174: mod_base = OTHER; note = uracil
  modified_base 178..179: mod_base = OTHER; note = uracil
  modified_base 187: mod_base = OTHER; note = uracil
  modified_base 189..190: mod_base = OTHER; note = uracil
  modified_base 195: mod_base = OTHER; note = uracil
  modified_base 197: mod_base = OTHER; note = uracil
  modified_base 203: mod_base = OTHER; note = uracil
  modified_base 205: mod_base = OTHER; note = uracil
  modified_base 208..212: mod_base = OTHER; note = uracil
  modified_base 222: mod_base = OTHER; note = uracil
  modified_base 227: mod_base = OTHER; note = uracil
  modified_base 230..232: mod_base = OTHER; note = uracil
  modified_base 248..249: mod_base = OTHER; note = uracil
  modified_base 252: mod_base = OTHER; note = uracil
  modified_base 257: mod_base = OTHER; note = uracil
  modified_base 259..260: mod_base = OTHER; note = uracil
  modified_base 281: mod_base = OTHER; note = uracil
  modified_base 294..295: mod_base = OTHER; note = uracil
  modified_base 297: mod_base = OTHER; note = uracil
  modified_base 15: mod_base = m5c
  modified_base 40: mod_base = m5c
  modified_base 57: mod_base = m5c
  modified_base 61: mod_base = m5c
  modified_base 69: mod_base = m5c
  modified_base 84: mod_base = m5c
  modified_base 91: mod_base = m5c
  modified_base 133: mod_base = m5c
  modified_base 157: mod_base = m5c
  modified_base 166: mod_base = m5c
  modified_base 169: mod_base = m5c
  modified_base 175: mod_base = m5c
  modified_base 214: mod_base = m5c
  modified_base 218: mod_base = m5c
  modified_base 253: mod_base = m5c
  modified_base 255: mod_base = m5c
  variation 150: note = CpG site, residue is C if methylated or T(=U) if unmethylated
tgggagttttagttcgggggtagattagtgtttagagttcgggttttgttatttagcgttcgaggtagcgtttttttatttaacgggggtcgtggtaattttttgatatgatttatgattatataatatattcggaaatttttttttatygtttttcgtttgggtcgtcgttttcggtttgggagattttaggttttagagtttttgtttttacgggcgattagtgttgtttagtggaaaaataatgttagtcgcgtattaaaattaggtgtaaaattaatattttttggaagttatttt

SEQ ID NO: 348 - DNA, 300 bp, synthetic construct
  source 1..300: mol_type = other DNA
  modified_base 7: mod_base = OTHER; note = uracil
  modified_base 10..11: mod_base = OTHER; note = uracil
  modified_base 29: mod_base = OTHER; note = uracil
  modified_base 31..32: mod_base = OTHER; note = uracil
  modified_base 49: mod_base = OTHER; note = uracil
  modified_base 53: mod_base = OTHER; note = uracil
  modified_base 63..64: mod_base = OTHER; note = uracil
  modified_base 66: mod_base = OTHER; note = uracil
  modified_base 71: mod_base = OTHER; note = uracil
  modified_base 74: mod_base = OTHER; note = uracil
  modified_base 76: mod_base = OTHER; note = uracil
  modified_base 83..84: mod_base = OTHER; note = uracil
  modified_base 93: mod_base = OTHER; note = uracil
  modified_base 99: mod_base = OTHER; note = uracil
  modified_base 101: mod_base = OTHER; note = uracil
  modified_base 107..108: mod_base = OTHER; note = uracil
  modified_base 115: mod_base = OTHER; note = uracil
  modified_base 117..119: mod_base = OTHER; note = uracil
  modified_base 123: mod_base = OTHER; note = uracil
  modified_base 136..138: mod_base = OTHER; note = uracil
  modified_base 165: mod_base = OTHER; note = uracil
  modified_base 183: mod_base = OTHER; note = uracil
  modified_base 190: mod_base = OTHER; note = uracil
  modified_base 195: mod_base = OTHER; note = uracil
  modified_base 205..206: mod_base = OTHER; note = uracil
  modified_base 211..214: mod_base = OTHER; note = uracil
  modified_base 232: mod_base = OTHER; note = uracil
  modified_base 235..236: mod_base = OTHER; note = uracil
  modified_base 244: mod_base = OTHER; note = uracil
  modified_base 252: mod_base = OTHER; note = uracil
  modified_base 257..258: mod_base = OTHER; note = uracil
  modified_base 263: mod_base = OTHER; note = uracil
  modified_base 265: mod_base = OTHER; note = uracil
  modified_base 270: mod_base = OTHER; note = uracil
  modified_base 272: mod_base = OTHER; note = uracil
  modified_base 277: mod_base = OTHER; note = uracil
  modified_base 280..283: mod_base = OTHER; note = uracil
  modified_base 288: mod_base = OTHER; note = uracil
  modified_base 294: mod_base = OTHER; note = uracil
  modified_base 296..298: mod_base = OTHER; note = uracil
  modified_base 44: mod_base = m5c
  modified_base 46: mod_base = m5c
  modified_base 81: mod_base = m5c
  modified_base 85: mod_base = m5c
  modified_base 124: mod_base = m5c
  modified_base 130: mod_base = m5c
  modified_base 133: mod_base = m5c
  modified_base 142: mod_base = m5c
  modified_base 166: mod_base = m5c
  modified_base 208: mod_base = m5c
  modified_base 215: mod_base = m5c
  modified_base 230: mod_base = m5c
  modified_base 238: mod_base = m5c
  modified_base 242: mod_base = m5c
  modified_base 259: mod_base = m5c
  modified_base 284: mod_base = m5c
  variation 149: note = CpG site, residue is C if methylated or T(=U) if unmethylated
aagtggtttttaaaaaatgttaattttatatttaattttggtgcgcggttggtattatttttttattgggtagtattgatcgttcgtgggggtagagattttgagatttggagttttttaggtcgggggcgacggtttagacgggaggyggtggagagaagttttcggatgtattatgtggttatgaattatgttagggaattgttacggttttcgttgaatggggaggcgttgtttcgggcgttgagtagtagagttcggattttgaatattggtttgttttcgaattggaatttttat

SEQ ID NO: 349 - DNA, 300 bp, synthetic construct
  source 1..300: mol_type = other DNA
  modified_base 8: mod_base = OTHER; note = uracil
  modified_base 11: mod_base = OTHER; note = uracil
  modified_base 16: mod_base = OTHER; note = uracil
  modified_base 20: mod_base = OTHER; note = uracil
  modified_base 23: mod_base = OTHER; note = uracil
  modified_base 25..26: mod_base = OTHER; note = uracil
  modified_base 36: mod_base = OTHER; note = uracil
  modified_base 39: mod_base = OTHER; note = uracil
  modified_base 42: mod_base = OTHER; note = uracil
  modified_base 45: mod_base = OTHER; note = uracil
  modified_base 47: mod_base = OTHER; note = uracil
  modified_base 53: mod_base = OTHER; note = uracil
  modified_base 56: mod_base = OTHER; note = uracil
  modified_base 58: mod_base = OTHER; note = uracil
  modified_base 64..65: mod_base = OTHER; note = uracil
  modified_base 69: mod_base = OTHER; note = uracil
  modified_base 72: mod_base = OTHER; note = uracil
  modified_base 74: mod_base = OTHER; note = uracil
  modified_base 77: mod_base = OTHER; note = uracil
  modified_base 79: mod_base = OTHER; note = uracil
  modified_base 85: mod_base = OTHER; note = uracil
  modified_base 92: mod_base = OTHER; note = uracil
  modified_base 95: mod_base = OTHER; note = uracil
  modified_base 107: mod_base = OTHER; note = uracil
  modified_base 112..113: mod_base = OTHER; note = uracil
  modified_base 116: mod_base = OTHER; note = uracil
  modified_base 128: mod_base = OTHER; note = uracil
  modified_base 130: mod_base = OTHER; note = uracil
  modified_base 134: mod_base = OTHER; note = uracil
  modified_base 138: mod_base = OTHER; note = uracil
  modified_base 141: mod_base = OTHER; note = uracil
  modified_base 143: mod_base = OTHER; note = uracil
  modified_base 145..146: mod_base = OTHER; note = uracil
  modified_base 149: mod_base = OTHER; note = uracil
  modified_base 152: mod_base = OTHER; note = uracil
  modified_base 156..158: mod_base = OTHER; note = uracil
  modified_base 161: mod_base = OTHER; note = uracil
  modified_base 170: mod_base = OTHER; note = uracil
  modified_base 176: mod_base = OTHER; note = uracil
  modified_base 178: mod_base = OTHER; note = uracil
  modified_base 185: mod_base = OTHER; note = uracil
  modified_base 197: mod_base = OTHER; note = uracil
  modified_base 211: mod_base = OTHER; note = uracil
  modified_base 235: mod_base = OTHER; note = uracil
  modified_base 238: mod_base = OTHER; note = uracil
  modified_base 242..243: mod_base = OTHER; note = uracil
  modified_base 245: mod_base = OTHER; note = uracil
  modified_base 248: mod_base = OTHER; note = uracil
  modified_base 250: mod_base = OTHER; note = uracil
  modified_base 252..254: mod_base = OTHER; note = uracil
  modified_base 257: mod_base = OTHER; note = uracil
  modified_base 263: mod_base = OTHER; note = uracil
  modified_base 266..267: mod_base = OTHER; note = uracil
  modified_base 273: mod_base = OTHER; note = uracil
  modified_base 281..282: mod_base = OTHER; note = uracil
  modified_base 285: mod_base = OTHER; note = uracil
  modified_base 289: mod_base = OTHER; note = uracil
  modified_base 291: mod_base = OTHER; note = uracil
  modified_base 295: mod_base = OTHER; note = uracil
  modified_base 1: mod_base = m5c
  modified_base 4: mod_base = m5c
  modified_base 37: mod_base = m5c
  modified_base 59: mod_base = m5c
  modified_base 103: mod_base = m5c
  modified_base 109: mod_base = m5c
  modified_base 135: mod_base = m5c
  modified_base 147: mod_base = m5c
  modified_base 179: mod_base = m5c
  modified_base 188: mod_base = m5c
  modified_base 199: mod_base = m5c
  modified_base 275: mod_base = m5c
  modified_base 279: mod_base = m5c
  variation 150: note = CpG site, residue is C if methylated or T(=U) if unmethylated
cggcgtgttttttggtaaatatttttttgaggatgtcgttgtagtatttgagttgtttcgagattttgttgtttttttttggtgttgggtgttgttgagagtcgggtacgtttttttttggaggttttataggtcggttgttttttcgtygttggtttagtttggtggttttgggtttcgggggtagcgagggtggttcgtgaatggggttaatggtggtgggggtggtggtgtttgtttttttttttatttttttttttgtttgttaagaatacggacgttaataggtatagttagaag

SEQ ID NO: 350 - DNA, 300 bp, synthetic construct
  source 1..300: mol_type = other DNA
  modified_base 1: mod_base = OTHER; note = uracil
  modified_base 4: mod_base = OTHER; note = uracil
  modified_base 8: mod_base = OTHER; note = uracil
  modified_base 13..14: mod_base = OTHER; note = uracil
  modified_base 24: mod_base = OTHER; note = uracil
  modified_base 31: mod_base = OTHER; note = uracil
  modified_base 36: mod_base = OTHER; note = uracil
  modified_base 40: mod_base = OTHER; note = uracil
  modified_base 64: mod_base = OTHER; note = uracil
  modified_base 68: mod_base = OTHER; note = uracil
  modified_base 70..71: mod_base = OTHER; note = uracil
  modified_base 73..74: mod_base = OTHER; note = uracil
  modified_base 76..80: mod_base = OTHER; note = uracil
  modified_base 82..83: mod_base = OTHER; note = uracil
  modified_base 85..86: mod_base = OTHER; note = uracil
  modified_base 92..95: mod_base = OTHER; note = uracil
  modified_base 99: mod_base = OTHER; note = uracil
  modified_base 105..106: mod_base = OTHER; note = uracil
  modified_base 108..110: mod_base = OTHER; note = uracil
  modified_base 114: mod_base = OTHER; note = uracil
  modified_base 117..120: mod_base = OTHER; note = uracil
  modified_base 126..128: mod_base = OTHER; note = uracil
  modified_base 133..134: mod_base = OTHER; note = uracil
  modified_base 136..137: mod_base = OTHER; note = uracil
  modified_base 141: mod_base = OTHER; note = uracil
  modified_base 146..147: mod_base = OTHER; note = uracil
  modified_base 161: mod_base = OTHER; note = uracil
  modified_base 164: mod_base = OTHER; note = uracil
  modified_base 168..169: mod_base = OTHER; note = uracil
  modified_base 177..178: mod_base = OTHER; note = uracil
  modified_base 180..181: mod_base = OTHER; note = uracil
  modified_base 195..196: mod_base = OTHER; note = uracil
  modified_base 200: mod_base = OTHER; note = uracil
  modified_base 202: mod_base = OTHER; note = uracil
  modified_base 204: mod_base = OTHER; note = uracil
  modified_base 207: mod_base = OTHER; note = uracil
  modified_base 210: mod_base = OTHER; note = uracil
  modified_base 212..214: mod_base = OTHER; note = uracil
  modified_base 217: mod_base = OTHER; note = uracil
  modified_base 219..220: mod_base = OTHER; note = uracil
  modified_base 230: mod_base = OTHER; note = uracil
  modified_base 233: mod_base = OTHER; note = uracil
  modified_base 239: mod_base = OTHER; note = uracil
  modified_base 246: mod_base = OTHER; note = uracil
  modified_base 249: mod_base = OTHER; note = uracil
  modified_base 251: mod_base = OTHER; note = uracil
  modified_base 257: mod_base = OTHER; note = uracil
  modified_base 260: mod_base = OTHER; note = uracil
  modified_base 266: mod_base = OTHER; note = uracil
  modified_base 269..270: mod_base = OTHER; note = uracil
  modified_base 272: mod_base = OTHER; note = uracil
  modified_base 286..287: mod_base = OTHER; note = uracil
  modified_base 294: mod_base = OTHER; note = uracil
  modified_base 298: mod_base = OTHER; note = uracil
  modified_base 21: mod_base = m5c
  modified_base 25: mod_base = m5c
  modified_base 101: mod_base = m5c
  modified_base 112: mod_base = m5c
  modified_base 121: mod_base = m5c
  modified_base 153: mod_base = m5c
  modified_base 165: mod_base = m5c
  modified_base 191: mod_base = m5c
  modified_base 197: mod_base = m5c
  modified_base 241: mod_base = m5c
  modified_base 263: mod_base = m5c
  modified_base 296: mod_base = m5c
  modified_base 299: mod_base = m5c
  variation 150: note = CpG site, residue is C if methylated or T(=U) if unmethylated
tttttgattgtgtttgttggcgttcgtgtttttggtagataaagaagggagtgaagaggaaagtagatattattatttttattattattgattttatttacgagttattttcgttgttttcggagtttaagattattaagttgggttagyggcgggagagtagtcggtttgtgaaatttttaaagaaggacgtgttcgatttttagtagtatttagtattagagaagagtagtaaggtttcggagtagtttaagtgttgtagcggtatttttaaggagatgtttgttaagaagtacgtcg

SEQ ID NO: 351 - DNA, 300 bp, synthetic construct
  source 1..300: mol_type = other DNA
  modified_base 5: mod_base = OTHER; note = uracil
  modified_base 8: mod_base = OTHER; note = uracil
  modified_base 11: mod_base = OTHER; note = uracil
  modified_base 16..17: mod_base = OTHER; note = uracil
  modified_base 20..21: mod_base = OTHER; note = uracil
  modified_base 25..28: mod_base = OTHER; note = uracil
  modified_base 32: mod_base = OTHER; note = uracil
  modified_base 37..39: mod_base = OTHER; note = uracil
  modified_base 41: mod_base = OTHER; note = uracil
  modified_base 49: mod_base = OTHER; note = uracil
  modified_base 52: mod_base = OTHER; note = uracil
  modified_base 58..59: mod_base = OTHER; note = uracil
  modified_base 65..66: mod_base = OTHER; note = uracil
  modified_base 74: mod_base = OTHER; note = uracil
  modified_base 77..80: mod_base = OTHER; note = uracil
  modified_base 85: mod_base = OTHER; note = uracil
  modified_base 95..96: mod_base = OTHER; note = uracil
  modified_base 103: mod_base = OTHER; note = uracil
  modified_base 112..113: mod_base = OTHER; note = uracil
  modified_base 115..117: mod_base = OTHER; note = uracil
  modified_base 124..125: mod_base = OTHER; note = uracil
  modified_base 128: mod_base = OTHER; note = uracil
  modified_base 133: mod_base = OTHER; note = uracil
  modified_base 135..137: mod_base = OTHER; note = uracil
  modified_base 139..140: mod_base = OTHER; note = uracil
  modified_base 143..144: mod_base = OTHER; note = uracil
  modified_base 146..147: mod_base = OTHER; note = uracil
  modified_base 151..152: mod_base = OTHER; note = uracil
  modified_base 155: mod_base = OTHER; note = uracil
  modified_base 157: mod_base = OTHER; note = uracil
  modified_base 161: mod_base = OTHER; note = uracil
  modified_base 163..164: mod_base = OTHER; note = uracil
  modified_base 171..172: mod_base = OTHER; note = uracil
  modified_base 175: mod_base = OTHER; note = uracil
  modified_base 178: mod_base = OTHER; note = uracil
  modified_base 181..182: mod_base = OTHER; note = uracil
  modified_base 189: mod_base = OTHER; note = uracil
  modified_base 191..193: mod_base = OTHER; note = uracil
  modified_base 195: mod_base = OTHER; note = uracil
  modified_base 203: mod_base = OTHER; note = uracil
  modified_base 207..210: mod_base = OTHER; note = uracil
  modified_base 215..216: mod_base = OTHER; note = uracil
  modified_base 219..220: mod_base = OTHER; note = uracil
  modified_base 224..225: mod_base = OTHER; note = uracil
  modified_base 228..229: mod_base = OTHER; note = uracil
  modified_base 232: mod_base = OTHER; note = uracil
  modified_base 239..240: mod_base = OTHER; note = uracil
  modified_base 242: mod_base = OTHER; note = uracil
  modified_base 245: mod_base = OTHER; note = uracil
  modified_base 254: mod_base = OTHER; note = uracil
  modified_base 263..264: mod_base = OTHER; note = uracil
  modified_base 271: mod_base = OTHER; note = uracil
  modified_base 273..274: mod_base = OTHER; note = uracil
  modified_base 282: mod_base = OTHER; note = uracil
  modified_base 287: mod_base = OTHER; note = uracil
  modified_base 290: mod_base = OTHER; note = uracil
  modified_base 86: mod_base = m5c
  modified_base 88: mod_base = m5c
  modified_base 104: mod_base = m5c
  modified_base 118: mod_base = m5c
  modified_base 211: mod_base = m5c
  modified_base 248: mod_base = m5c
  modified_base 258: mod_base = m5c
  modified_base 277: mod_base = m5c
  modified_base 288: mod_base = m5c
  modified_base 292: mod_base = m5c
  variation 149: note = CpG site, residue is C if methylated or T(=U) if unmethylated
tggtttgttttaagttttatttggtttttggtaagttttatttggtgatattttgtgtttgggtttttgagggttgttttagattcgcgattgttttggggatcggtagttttttttcggatgttagtaaagttttttttagtttttaygtttgtatagtttttagtatgtttttaatagttattagttattttttgtgagttagattttcggttttgttaggttaatttgtttggggttttagtagcgggggttggcgaggttagttttttttagcggttttaagtcgttcgagggtgg

SEQ ID NO: 352 - DNA, 300 bp, synthetic construct
  source 1..300: mol_type = other DNA
  modified_base 1: mod_base = OTHER; note = uracil
  modified_base 3..5: mod_base = OTHER; note = uracil
  modified_base 14: mod_base = OTHER; note = uracil
  modified_base 21: mod_base = OTHER; note = uracil
  modified_base 24: mod_base = OTHER; note = uracil
  modified_base 34: mod_base = OTHER; note = uracil
  modified_base 38..39: mod_base = OTHER; note = uracil
  modified_base 43..44: mod_base = OTHER; note = uracil
  modified_base 47..50: mod_base = OTHER; note = uracil
  modified_base 53: mod_base = OTHER; note = uracil
  modified_base 56: mod_base = OTHER; note = uracil
  modified_base 62..65: mod_base = OTHER; note = uracil
  modified_base 69: mod_base = OTHER; note = uracil
  modified_base 77..78: mod_base = OTHER; note = uracil
  modified_base 82: mod_base = OTHER; note = uracil
  modified_base 87: mod_base = OTHER; note = uracil
  modified_base 95: mod_base = OTHER; note = uracil
  modified_base 99: mod_base = OTHER; note = uracil
  modified_base 101: mod_base = OTHER; note = uracil
  modified_base 103: mod_base = OTHER; note = uracil
  modified_base 113: mod_base = OTHER; note = uracil
  modified_base 120: mod_base = OTHER; note = uracil
  modified_base 130: mod_base = OTHER; note = uracil
  modified_base 134: mod_base = OTHER; note = uracil
  modified_base 141: mod_base = OTHER; note = uracil
  modified_base 146: mod_base = OTHER; note = uracil
  modified_base 158: mod_base = OTHER; note = uracil
  modified_base 168: mod_base = OTHER; note = uracil
  modified_base 173: mod_base = OTHER; note = uracil
  modified_base 177: mod_base = OTHER; note = uracil
  modified_base 180: mod_base = OTHER; note = uracil
  modified_base 191: mod_base = OTHER; note = uracil
  modified_base 194: mod_base = OTHER; note = uracil
  modified_base 199..202: mod_base = OTHER; note = uracil
  modified_base 207: mod_base = OTHER; note = uracil
  modified_base 218: mod_base = OTHER; note = uracil
  modified_base 224: mod_base = OTHER; note = uracil
  modified_base 227..229: mod_base = OTHER; note = uracil
  modified_base 231: mod_base = OTHER; note = uracil
  modified_base 237..239: mod_base = OTHER; note = uracil
  modified_base 243: mod_base = OTHER; note = uracil
  modified_base 245: mod_base = OTHER; note = uracil
  modified_base 253: mod_base = OTHER; note = uracil
  modified_base 255..256: mod_base = OTHER; note = uracil
  modified_base 265: mod_base = OTHER; note = uracil
  modified_base 269..270: mod_base = OTHER; note = uracil
  modified_base 276..277: mod_base = OTHER; note = uracil
  modified_base 286: mod_base = OTHER; note = uracil
  modified_base 293: mod_base = OTHER; note = uracil
  modified_base 297..298: mod_base = OTHER; note = uracil
  modified_base 7: mod_base = m5c
  modified_base 11: mod_base = m5c
  modified_base 22: mod_base = m5c
  modified_base 41: mod_base = m5c
  modified_base 51: mod_base = m5c
  modified_base 88: mod_base = m5c
  modified_base 181: mod_base = m5c
  modified_base 195: mod_base = m5c
  modified_base 211: mod_base = m5c
  modified_base 213: mod_base = m5c
  variation 150: note = CpG site, residue is C if methylated or T(=U) if unmethylated
tattttcgagcggtttagaatcgttggagaaaattggtttcgttagttttcgttgttgaggttttaagtaggttggtttggtaggatcgggggtttgatttatagagggtgattaatggttgttgaaggtatattggagattgtgtaggygtggaggttggagggagttttgttggtattcggggaggaattatcggtttttaggataatcgcggatttggggtagtttttaaggatttaggtataagatgttattaagtgggatttgttaggggttaggtaggatttgaagtagattag

SEQ ID NO: 353 - DNA, 300 bp, synthetic construct
  source 1..300: mol_type = other DNA
  modified_base 2..3: mod_base = OTHER; note = uracil
  modified_base 11..12: mod_base = OTHER; note = uracil
  modified_base 14: mod_base = OTHER; note = uracil
  modified_base 18: mod_base = OTHER; note = uracil
  modified_base 21: mod_base = OTHER; note = uracil
  modified_base 47..49: mod_base = OTHER; note = uracil
  modified_base 51: mod_base = OTHER; note = uracil
  modified_base 53..54: mod_base = OTHER; note = uracil
  modified_base 61: mod_base = OTHER; note = uracil
  modified_base 69: mod_base = OTHER; note = uracil
  modified_base 72: mod_base = OTHER; note = uracil
  modified_base 77: mod_base = OTHER; note = uracil
  modified_base 80..81: mod_base = OTHER; note = uracil
  modified_base 84: mod_base = OTHER; note = uracil
  modified_base 88: mod_base = OTHER; note = uracil
  modified_base 90: mod_base = OTHER; note = uracil
  modified_base 103..105: mod_base = OTHER; note = uracil
  modified_base 108: mod_base = OTHER; note = uracil
  modified_base 110: mod_base = OTHER; note = uracil
  modified_base 115..116: mod_base = OTHER; note = uracil
  modified_base 119: mod_base = OTHER; note = uracil
  modified_base 124: mod_base = OTHER; note = uracil
  modified_base 127..131: mod_base = OTHER; note = uracil
  modified_base 136: mod_base = OTHER; note = uracil
  modified_base 145: mod_base = OTHER; note = uracil
  modified_base 149: mod_base = OTHER; note = uracil
  modified_base 152: mod_base = OTHER; note = uracil
  modified_base 155: mod_base = OTHER; note = uracil
  modified_base 165: mod_base = OTHER; note = uracil
  modified_base 167: mod_base = OTHER; note = uracil
  modified_base 174: mod_base = OTHER; note = uracil
  modified_base 177: mod_base = OTHER; note = uracil
  modified_base 180: mod_base = OTHER; note = uracil
  modified_base 189: mod_base = OTHER; note = uracil
  modified_base 198: mod_base = OTHER; note = uracil
  modified_base 200: mod_base = OTHER; note = uracil
  modified_base 204: mod_base = OTHER; note = uracil
  modified_base 207..209: mod_base = OTHER; note = uracil
  modified_base 221: mod_base = OTHER; note = uracil
  modified_base 223: mod_base = OTHER; note = uracil
  modified_base 226: mod_base = OTHER; note = uracil
  modified_base 229: mod_base = OTHER; note = uracil
  modified_base 233..234: mod_base = OTHER; note = uracil
  modified_base 236: mod_base = OTHER; note = uracil
  modified_base 239: mod_base = OTHER; note = uracil
  modified_base 242..243: mod_base = OTHER; note = uracil
  modified_base 248: mod_base = OTHER; note = uracil
  modified_base 253..254: mod_base = OTHER; note = uracil
  modified_base 262: mod_base = OTHER; note = uracil
  modified_base 265..266: mod_base = OTHER; note = uracil
  modified_base 278..279: mod_base = OTHER; note = uracil
  modified_base 284: mod_base = OTHER; note = uracil
  modified_base 286..287: mod_base = OTHER; note = uracil
  modified_base 291: mod_base = OTHER; note = uracil
  modified_base 300: mod_base = OTHER; note = uracil
  modified_base 8: mod_base = m5c
  modified_base 15: mod_base = m5c
  modified_base 23: mod_base = m5c
  modified_base 36: mod_base = m5c
  modified_base 38: mod_base = m5c
  modified_base 43: mod_base = m5c
  modified_base 45: mod_base = m5c
  modified_base 56: mod_base = m5c
  modified_base 73: mod_base = m5c
  modified_base 75: mod_base = m5c
  modified_base 78: mod_base = m5c
  modified_base 86: mod_base = m5c
  modified_base 92: mod_base = m5c
  modified_base 98: mod_base = m5c
  modified_base 111: mod_base = m5c
  modified_base 113: mod_base = m5c
  modified_base 117: mod_base = m5c
  modified_base 120: mod_base = m5c
  modified_base 122: mod_base = m5c
  modified_base 125: mod_base = m5c
  modified_base 134: mod_base = m5c
  modified_base 137: mod_base = m5c
  modified_base 142: mod_base = m5c
  modified_base 146: mod_base = m5c
  modified_base 153: mod_base = m5c
  modified_base 170: mod_base = m5c
  modified_base 172: mod_base = m5c
  modified_base 183: mod_base = m5c
  modified_base 185: mod_base = m5c
  modified_base 194: mod_base = m5c
  modified_base 201: mod_base = m5c
  modified_base 210: mod_base = m5c
  modified_base 224: mod_base = m5c
  modified_base 227: mod_base = m5c
  modified_base 231: mod_base = m5c
  modified_base 240: mod_base = m5c
  modified_base 246: mod_base = m5c
  modified_base 249: mod_base = m5c
  modified_base 255: mod_base = m5c
  modified_base 267: mod_base = m5c
  modified_base 275: mod_base = m5c
  modified_base 281: mod_base = m5c
  modified_base 294: mod_base = m5c
  variation 150: note = CpG site, residue is C if methylated or T(=U) if unmethylated
atttggtcggttatcggtagttcggggaagaagggcgcgtggcgcgtttattttacggtgttgaagagtagtcgcgtcgttagttcgtatacgttgtcgatgtttagtatcgcgttcgtcgcgtcgttttttgcgtcgaagcgttcggtygtcgtagggtagggtttagcgcgtagtagttgcgcgattagttcggatatcggttgtttcgggaagaggttttcgtcgttcgttattgtcgttagcgtcgagttcggggggttgttcgaggaggcggttacggtattaggtagcgagtgt

SEQ ID NO: 354 - DNA, 300 bp, synthetic construct
  source 1..300: mol_type = other DNA
  modified_base 2: mod_base = OTHER; note = uracil
  modified_base 4: mod_base = OTHER; note = uracil
  modified_base 8: mod_base = OTHER; note = uracil
  modified_base 11..12: mod_base = OTHER; note = uracil
  modified_base 18: mod_base = OTHER; note = uracil
  modified_base 24: mod_base = OTHER; note = uracil
  modified_base 27..28: mod_base = OTHER; note = uracil
  modified_base 30..31: mod_base = OTHER; note = uracil
  modified_base 37: mod_base = OTHER; note = uracil
  modified_base 40..44: mod_base = OTHER; note = uracil
  modified_base 49: mod_base = OTHER; note = uracil
  modified_base 56: mod_base = OTHER; note = uracil
  modified_base 63: mod_base = OTHER; note = uracil
  modified_base 82..83: mod_base = OTHER; note = uracil
  modified_base 85: mod_base = OTHER; note = uracil
  modified_base 88..89: mod_base = OTHER; note = uracil
  modified_base 95: mod_base = OTHER; note = uracil
  modified_base 98: mod_base = OTHER; note = uracil
  modified_base 105: mod_base = OTHER; note = uracil
  modified_base 110: mod_base = OTHER; note = uracil
  modified_base 119: mod_base = OTHER; note = uracil
  modified_base 122: mod_base = OTHER; note = uracil
  modified_base 125: mod_base = OTHER; note = uracil
  modified_base 132: mod_base = OTHER; note = uracil
  modified_base 137..139: mod_base = OTHER; note = uracil
  modified_base 142..144: mod_base = OTHER; note = uracil
  modified_base 153: mod_base = OTHER; note = uracil
  modified_base 160: mod_base = OTHER; note = uracil
  modified_base 168: mod_base = OTHER; note = uracil
  modified_base 194: mod_base = OTHER; note = uracil
  modified_base 199: mod_base = OTHER; note = uracil
  modified_base 205: mod_base = OTHER; note = uracil
  modified_base 218: mod_base = OTHER; note = uracil
  modified_base 230: mod_base = OTHER; note = uracil
  modified_base 233: mod_base = OTHER; note = uracil
  modified_base 235: mod_base = OTHER; note = uracil
  modified_base 238: mod_base = OTHER; note = uracil
  modified_base 241: mod_base = OTHER; note = uracil
  modified_base 243: mod_base = OTHER; note = uracil
  modified_base 259..260: mod_base = OTHER; note = uracil
  modified_base 266..268: mod_base = OTHER; note = uracil
  modified_base 271: mod_base = OTHER; note = uracil
  modified_base 274..276: mod_base = OTHER; note = uracil
  modified_base 281: mod_base = OTHER; note = uracil
  modified_base 284: mod_base = OTHER; note = uracil
  modified_base 291: mod_base = OTHER; note = uracil
  modified_base 295..296: mod_base = OTHER; note = uracil
  modified_base 6: mod_base = m5c
  modified_base 19: mod_base = m5c
  modified_base 25: mod_base = m5c
  modified_base 33: mod_base = m5c
  modified_base 45: mod_base = m5c
  modified_base 51: mod_base = m5c
  modified_base 54: mod_base = m5c
  modified_base 60: mod_base = m5c
  modified_base 69: mod_base = m5c
  modified_base 73: mod_base = m5c
  modified_base 76: mod_base = m5c
  modified_base 90: mod_base = m5c
  modified_base 99: mod_base = m5c
  modified_base 106: mod_base = m5c
  modified_base 115: mod_base = m5c
  modified_base 117: mod_base = m5c
  modified_base 128: mod_base = m5c
  modified_base 130: mod_base = m5c
  modified_base 147: mod_base = m5c
  modified_base 154: mod_base = m5c
  modified_base 158: mod_base = m5c
  modified_base 163: mod_base = m5c
  modified_base 166: mod_base = m5c
  modified_base 175: mod_base = m5c
  modified_base 178: mod_base = m5c
  modified_base 180: mod_base = m5c
  modified_base 183: mod_base = m5c
  modified_base 187: mod_base = m5c
  modified_base 189: mod_base = m5c
  modified_base 202: mod_base = m5c
  modified_base 208: mod_base = m5c
  modified_base 214: mod_base = m5c
  modified_base 222: mod_base = m5c
  modified_base 225: mod_base = m5c
  modified_base 227: mod_base = m5c
  modified_base 244: mod_base = m5c
  modified_base 255: mod_base = m5c
  modified_base 257: mod_base = m5c
  modified_base 262: mod_base = m5c
  modified_base 264: mod_base = m5c
  modified_base 277: mod_base = m5c
  modified_base 285: mod_base = m5c
  modified_base 292: mod_base = m5c
  variation 150: note = CpG site, residue is C if methylated or T(=U) if unmethylated
gtattcgttgtttggtgtcgtggtcgttttttcgggtagtttttcgggttcggcgttggcggtagtggcgagcggcggagattttttttcggggtagtcggtgttcgaattgatcgcgtagttgttgcgcgttgagttttattttgcggyggtcggacgtttcggcgtagggggcggcgcggcgggcgcggtgttgggtatcgataacgtgtgcgagttggcggcgcggttgttttttagtatcgtggagtgggcgcgttacgcgtttttttttttcgagttgtcggtggtcgattaggt

SEQ ID NO: 355 - DNA, 300 bp, synthetic construct
  source 1..300: mol_type = other DNA
  modified_base 4: mod_base = OTHER; note = uracil
  modified_base 12: mod_base = OTHER; note = uracil
  modified_base 18..19: mod_base = OTHER; note = uracil
  modified_base 26: mod_base = OTHER; note = uracil
  modified_base 59: mod_base = OTHER; note = uracil
  modified_base 67: mod_base = OTHER; note = uracil
  modified_base 73..75: mod_base = OTHER; note = uracil
  modified_base 93: mod_base = OTHER; note = uracil
  modified_base 104: mod_base = OTHER; note = uracil
  modified_base 106: mod_base = OTHER; note = uracil
  modified_base 119..121: mod_base = OTHER; note = uracil
  modified_base 130: mod_base = OTHER; note = uracil
  modified_base 132: mod_base = OTHER; note = uracil
  modified_base 135..136: mod_base = OTHER; note = uracil
  modified_base 143: mod_base = OTHER; note = uracil
  modified_base 147..149: mod_base = OTHER; note = uracil
  modified_base 155: mod_base = OTHER; note = uracil
  modified_base 161..162: mod_base = OTHER; note = uracil
  modified_base 166: mod_base = OTHER; note = uracil
  modified_base 170: mod_base = OTHER; note = uracil
  modified_base 172: mod_base = OTHER; note = uracil
  modified_base 174: mod_base = OTHER; note = uracil
  modified_base 183: mod_base = OTHER; note = uracil
  modified_base 194: mod_base = OTHER; note = uracil
  modified_base 203..204: mod_base = OTHER; note = uracil
  modified_base 218: mod_base = OTHER; note = uracil
  modified_base 246: mod_base = OTHER; note = uracil
  modified_base 254..255: mod_base = OTHER; note = uracil
  modified_base 259: mod_base = OTHER; note = uracil
  modified_base 264..265: mod_base = OTHER; note = uracil
  modified_base 273: mod_base = OTHER; note = uracil
  modified_base 285: mod_base = OTHER; note = uracil
  modified_base 291: mod_base = OTHER; note = uracil
  modified_base 297: mod_base = OTHER; note = uracil
  modified_base 299: mod_base = OTHER; note = uracil
  modified_base 53: mod_base = m5c
  modified_base 101: mod_base = m5c
  modified_base 122: mod_base = m5c
  modified_base 175: mod_base = m5c
  modified_base 210: mod_base = m5c
  modified_base 238: mod_base = m5c
  modified_base 247: mod_base = m5c
  variation 150: note = CpG site, residue is C if methylated or T(=U) if unmethylated
tggtagagatataaatttttgatggtagaggagggagagagagtgtgggtgacgatgataattgaattgagatttaaaggaggtaggggagatatatgggcgtttttgggaagatggttttcgggaaagtatagtttttagataggtttygaggtaggagtttgtttgatttatcggaggagtttggaggaggttgaggtggtttaagtcgattaagtagggtggggagggaagaggcgatggtgtcgtgagattaagtagggttttgaggtttggggggagaattttggtttttatttt

SEQ ID NO: 356 - DNA, 300 bp, synthetic construct
  source 1..300: mol_type = other DNA
  modified_base 10..11: mod_base = OTHER; note = uracil
  modified_base 18: mod_base = OTHER; note = uracil
  modified_base 20..25: mod_base = OTHER; note = uracil
  modified_base 29..30: mod_base = OTHER; note = uracil
  modified_base 32: mod_base = OTHER; note = uracil
  modified_base 37..39: mod_base = OTHER; note = uracil
  modified_base 42: mod_base = OTHER; note = uracil
  modified_base 48: mod_base = OTHER; note = uracil
  modified_base 50: mod_base = OTHER; note = uracil
  modified_base 55: mod_base = OTHER; note = uracil
  modified_base 57..58: mod_base = OTHER; note = uracil
  modified_base 63..64: mod_base = OTHER; note = uracil
  modified_base 66: mod_base = OTHER; note = uracil
  modified_base 69..71: mod_base = OTHER; note = uracil
  modified_base 73..76: mod_base = OTHER; note = uracil
  modified_base 78..80: mod_base = OTHER; note = uracil
  modified_base 83: mod_base = OTHER; note = uracil
  modified_base 92: mod_base = OTHER; note = uracil
  modified_base 98..99: mod_base = OTHER; note = uracil
  modified_base 101..102: mod_base = OTHER; note = uracil
  modified_base 104: mod_base = OTHER; note = uracil
  modified_base 107..108: mod_base = OTHER; note = uracil
  modified_base 110..111: mod_base = OTHER; note = uracil
  modified_base 113..114: mod_base = OTHER; note = uracil
  modified_base 118: mod_base = OTHER; note = uracil
  modified_base 120..121: mod_base = OTHER; note = uracil
  modified_base 123: mod_base = OTHER; note = uracil
  modified_base 132: mod_base = OTHER; note = uracil
  modified_base 136: mod_base = OTHER; note = uracil
  modified_base 140: mod_base = OTHER; note = uracil
  modified_base 142..143: mod_base = OTHER; note = uracil
  modified_base 146..147: mod_base = OTHER; note = uracil
  modified_base 154..155: mod_base = OTHER; note = uracil
  modified_base 159: mod_base = OTHER; note = uracil
  modified_base 166: mod_base = OTHER; note = uracil
  modified_base 171: mod_base = OTHER; note = uracil
  modified_base 175..176: mod_base = OTHER; note = uracil
  modified_base 183..184: mod_base = OTHER; note = uracil
  modified_base 187: mod_base = OTHER; note = uracil
  modified_base 190..192: mod_base = OTHER; note = uracil
  modified_base 200..202: mod_base = OTHER; note = uracil
  modified_base 209: mod_base = OTHER; note = uracil
  modified_base 211..214: mod_base = OTHER; note = uracil
  modified_base 217..218: mod_base = OTHER; note = uracil
  modified_base 220..221: mod_base = OTHER; note = uracil
  modified_base 229: mod_base = OTHER; note = uracil
  modified_base 231: mod_base = OTHER; note = uracil
  modified_base 236: mod_base = OTHER; note = uracil
  modified_base 243: mod_base = OTHER; note = uracil
  modified_base 249: mod_base = OTHER; note = uracil
  modified_base 251..253: mod_base = OTHER; note = uracil
  modified_base 255: mod_base = OTHER; note = uracil
  modified_base 257: mod_base = OTHER; note = uracil
  modified_base 259: mod_base = OTHER; note = uracil
  modified_base 261: mod_base = OTHER; note = uracil
  modified_base 263: mod_base = OTHER; note = uracil
  modified_base 265..267: mod_base = OTHER; note = uracil
  modified_base 269..270: mod_base = OTHER; note = uracil
  modified_base 272: mod_base = OTHER; note = uracil
  modified_base 275..276: mod_base = OTHER; note = uracil
  modified_base 279: mod_base = OTHER; note = uracil
  modified_base 292: mod_base = OTHER; note = uracil
  modified_base 294: mod_base = OTHER; note = uracil
  modified_base 297..298: mod_base = OTHER; note = uracil
  modified_base 52: mod_base = m5c
  modified_base 61: mod_base = m5c
  modified_base 89: mod_base = m5c
  modified_base 124: mod_base = m5c
  modified_base 177: mod_base = m5c
  modified_base 198: mod_base = m5c
  modified_base 246: mod_base = m5c
  variation 149: note = CpG site, residue is C if methylated or T(=U) if unmethylated
gagtaaaagttaaagttttttttttagattttaaggttttgtttggttttacggtattatcgttttttttttttttattttgtttaatcgatttaggttattttagttttttttaagttttttcggtgagttagataggtttttgtttyggggtttgtttaaaggttgtgttttttcggggattatttttttagagacgtttatatgttttttttattttttttgggttttagtttaattgttatcgttatttatatttttttttttttttttgttattaggaatttgtatttttgttag

SEQ ID NO: 357 - DNA, 300 bp, synthetic construct
  source 1..300: mol_type = other DNA
  modified_base 33: mod_base = OTHER; note = uracil
  modified_base 41: mod_base = OTHER; note = uracil
  modified_base 47..49: mod_base = OTHER; note = uracil
  modified_base 67: mod_base = OTHER; note = uracil
  modified_base 78: mod_base = OTHER; note = uracil
  modified_base 80: mod_base = OTHER; note = uracil
  modified_base 93..95: mod_base = OTHER; note = uracil
  modified_base 104: mod_base = OTHER; note = uracil
  modified_base 106: mod_base = OTHER; note = uracil
  modified_base 109..110: mod_base = OTHER; note = uracil
  modified_base 117: mod_base = OTHER; note = uracil
  modified_base 121..123: mod_base = OTHER; note = uracil
  modified_base 129: mod_base = OTHER; note = uracil
  modified_base 135..136: mod_base = OTHER; note = uracil
  modified_base 140: mod_base = OTHER; note = uracil
  modified_base 144: mod_base = OTHER; note = uracil
  modified_base 146: mod_base = OTHER; note = uracil
  modified_base 148: mod_base = OTHER; note = uracil
  modified_base 157: mod_base = OTHER; note = uracil
  modified_base 168: mod_base = OTHER; note = uracil
  modified_base 177..178: mod_base = OTHER; note = uracil
  modified_base 192: mod_base = OTHER; note = uracil
  modified_base 220: mod_base = OTHER; note = uracil
  modified_base 228..229: mod_base = OTHER; note = uracil
  modified_base 233: mod_base = OTHER; note = uracil
  modified_base 238..239: mod_base = OTHER; note = uracil
  modified_base 247: mod_base = OTHER; note = uracil
  modified_base 259: mod_base = OTHER; note = uracil
  modified_base 265: mod_base = OTHER; note = uracil
  modified_base 271: mod_base = OTHER; note = uracil
  modified_base 273: mod_base = OTHER; note = uracil
  modified_base 289..290: mod_base = OTHER; note = uracil
  modified_base 292: mod_base = OTHER; note = uracil
  modified_base 298: mod_base = OTHER; note = uracil
  modified_base 27: mod_base = m5c
  modified_base 75: mod_base = m5c
  modified_base 96: mod_base = m5c
  modified_base 124: mod_base = m5c
  modified_base 184: mod_base = m5c
  modified_base 212: mod_base = m5c
  modified_base 221: mod_base = m5c
  variation 149: note = CpG site, residue is C if methylated or T(=U) if unmethylated
agaggagggagagagagtgtgggtgacgatgataattgaattgagatttaaaggaggtaggggagatatatgggcgtttttgggaagatggttttcgggaaagtatagtttttagataggtttcgaggtaggagtttgtttgatttatyggaggagtttggaggaggttgaggtggtttaagtcgattaagtagggtggggagggaagaggcgatggtgtcgtgagattaagtagggttttgaggtttggggggagaattttggtttttattttgaggaaggtgggagttatagaggttt

SEQ ID NO: 358 - DNA, 300 bp, synthetic construct
  source 1..300: mol_type = other DNA
  modified_base 3..4: mod_base = OTHER; note = uracil
  modified_base 6: mod_base = OTHER; note = uracil
  modified_base 12: mod_base = OTHER; note = uracil
  modified_base 14..16: mod_base = OTHER; note = uracil
  modified_base 18..19: mod_base = OTHER; note = uracil
  modified_base 22..23: mod_base = OTHER; note = uracil
  modified_base 25: mod_base = OTHER; note = uracil
  modified_base 36..37: mod_base = OTHER; note = uracil
  modified_base 44: mod_base = OTHER; note = uracil
  modified_base 46..51: mod_base = OTHER; note = uracil
  modified_base 55..56: mod_base = OTHER; note = uracil
  modified_base 58: mod_base = OTHER; note = uracil
  modified_base 63..65: mod_base = OTHER; note = uracil
  modified_base 68: mod_base = OTHER; note = uracil
  modified_base 74: mod_base = OTHER; note = uracil
  modified_base 76: mod_base = OTHER; note = uracil
  modified_base 81: mod_base = OTHER; note = uracil
  modified_base 83..84: mod_base = OTHER; note = uracil
  modified_base 89..90: mod_base = OTHER; note = uracil
  modified_base 92: mod_base = OTHER; note = uracil
  modified_base 95..97: mod_base = OTHER; note = uracil
  modified_base 99..102: mod_base = OTHER; note = uracil
  modified_base 104..106: mod_base = OTHER; note = uracil
  modified_base 109: mod_base = OTHER; note = uracil
  modified_base 118: mod_base = OTHER; note = uracil
  modified_base 124..125: mod_base = OTHER; note = uracil
  modified_base 127..128: mod_base = OTHER; note = uracil
  modified_base 130: mod_base = OTHER; note = uracil
  modified_base 133..134: mod_base = OTHER; note = uracil
  modified_base 136..137: mod_base = OTHER; note = uracil
  modified_base 139..140: mod_base = OTHER; note = uracil
  modified_base 144: mod_base = OTHER; note = uracil
  modified_base 146..147: mod_base = OTHER; note = uracil
  modified_base 149: mod_base = OTHER; note = uracil
  modified_base 158: mod_base = OTHER; note = uracil
  modified_base 162: mod_base = OTHER; note = uracil
  modified_base 166: mod_base = OTHER; note = uracil
  modified_base 168..169: mod_base = OTHER; note = uracil
  modified_base 172..173: mod_base = OTHER; note = uracil
  modified_base 180..181: mod_base = OTHER; note = uracil
  modified_base 185: mod_base = OTHER; note = uracil
  modified_base 192: mod_base = OTHER; note = uracil
  modified_base 197: mod_base = OTHER; note = uracil
  modified_base 201..202: mod_base = OTHER; note = uracil
  modified_base 209..210: mod_base = OTHER; note = uracil
  modified_base 213: mod_base = OTHER; note = uracil
  modified_base 216..218: mod_base = OTHER; note = uracil
  modified_base 226..228: mod_base = OTHER; note = uracil
  modified_base 235: mod_base = OTHER; note = uracil
  modified_base 237..240: mod_base = OTHER; note = uracil
  modified_base 243..244: mod_base = OTHER; note = uracil
  modified_base 246..247: mod_base = OTHER; note = uracil
  modified_base 255: mod_base = OTHER; note = uracil
  modified_base 257: mod_base = OTHER; note = uracil
  modified_base 262: mod_base = OTHER; note = uracil
  modified_base 269: mod_base = OTHER; note = uracil
  modified_base 275: mod_base = OTHER; note = uracil
  modified_base 277..279: mod_base = OTHER; note = uracil
  modified_base 281: mod_base = OTHER; note = uracil
  modified_base 283: mod_base = OTHER; note = uracil
  modified_base 285: mod_base = OTHER; note = uracil
  modified_base 287: mod_base = OTHER; note = uracil
  modified_base 289: mod_base = OTHER; note = uracil
  modified_base 291..293: mod_base = OTHER; note = uracil
  modified_base 295..296: mod_base = OTHER; note = uracil
  modified_base 298: mod_base = OTHER; note = uracil
  modified_base 78: mod_base = m5c
  modified_base 87: mod_base = m5c
  modified_base 115: mod_base = m5c
  modified_base 175: mod_base = m5c
  modified_base 203: mod_base = m5c
  modified_base 224: mod_base = m5c
  modified_base 272: mod_base = m5c
  variation 150: note = CpG site, residue is C if methylated or T(=U) if unmethylated
agtttttgtggtttttattttttttagagtaaaagttaaagttttttttttagattttaaggttttgtttggttttacggtattatcgttttttttttttttattttgtttaatcgatttaggttattttagttttttttaagttttttyggtgagttagataggtttttgtttcggggtttgtttaaaggttgtgttttttcggggattatttttttagagacgtttatatgttttttttattttttttgggttttagtttaattgttatcgttatttatatttttttttttttttttg

SEQ ID NO: 359 - DNA, 300 bp, synthetic construct
  source 1..300: mol_type = other DNA
  modified_base 8: mod_base = OTHER; note = uracil
  modified_base 10: mod_base = OTHER; note = uracil
  modified_base 23..25: mod_base = OTHER; note = uracil
  modified_base 34: mod_base = OTHER; note = uracil
  modified_base 36: mod_base = OTHER; note = uracil
  modified_base 39..40: mod_base = OTHER; note = uracil
  modified_base 47: mod_base = OTHER; note = uracil
  modified_base 51..53: mod_base = OTHER; note = uracil
  modified_base 59: mod_base = OTHER; note = uracil
  modified_base 65..66: mod_base = OTHER; note = uracil
  modified_base 70: mod_base = OTHER; note = uracil
  modified_base 74: mod_base = OTHER; note = uracil
  modified_base 76: mod_base = OTHER; note = uracil
  modified_base 78: mod_base = OTHER; note = uracil
  modified_base 87: mod_base = OTHER; note = uracil
  modified_base 98: mod_base = OTHER; note = uracil
  modified_base 107..108: mod_base = OTHER; note = uracil
  modified_base 122: mod_base = OTHER; note = uracil
  modified_base 150: mod_base = OTHER; note = uracil
  modified_base 158..159: mod_base = OTHER; note = uracil
  modified_base 163: mod_base = OTHER; note = uracil
  modified_base 168..169: mod_base = OTHER; note = uracil
  modified_base 177: mod_base = OTHER; note = uracil
  modified_base 189: mod_base = OTHER; note = uracil
  modified_base 195: mod_base = OTHER; note = uracil
  modified_base 201: mod_base = OTHER; note = uracil
  modified_base 203: mod_base = OTHER; note = uracil
  modified_base 219..220: mod_base = OTHER; note = uracil
  modified_base 222: mod_base = OTHER; note = uracil
  modified_base 228: mod_base = OTHER; note = uracil
  modified_base 231: mod_base = OTHER; note = uracil
  modified_base 236: mod_base = OTHER; note = uracil
  modified_base 247: mod_base = OTHER; note = uracil
  modified_base 251: mod_base = OTHER; note = uracil
  modified_base 256: mod_base = OTHER; note = uracil
  modified_base 258: mod_base = OTHER; note = uracil
  modified_base 265..266: mod_base = OTHER; note = uracil
  modified_base 280: mod_base = OTHER; note = uracil
  modified_base 5: mod_base = m5c
  modified_base 26: mod_base = m5c
  modified_base 54: mod_base = m5c
  modified_base 79: mod_base = m5c
  modified_base 114: mod_base = m5c
  modified_base 142: mod_base = m5c
  modified_base 252: mod_base = m5c
  variation 151: note = CpG site, residue is C if methylated or T(=U) if unmethylated
tgggcgtttttgggaagatggttttcgggaaagtatagtttttagataggtttcgaggtaggagtttgtttgatttatcggaggagtttggaggaggttgaggtggtttaagtcgattaagtagggtggggagggaagaggcgatggtgtygtgagattaagtagggttttgaggtttggggggagaattttggtttttattttgaggaaggtgggagttatagaggtttttagatagaagaaggataagtcggatttaggatattagggtgggggtatttgtgggggataaagggagaa

SEQ ID NO: 360 - DNA, 300 bp, synthetic construct
  source 1..300: mol_type = other DNA
  modified_base 3: mod_base = OTHER; note = uracil
  modified_base 5..7: mod_base = OTHER; note = uracil
  modified_base 13..17: mod_base = OTHER; note = uracil
  modified_base 19: mod_base = OTHER; note = uracil
  modified_base 25..29: mod_base = OTHER; note = uracil
  modified_base 31..33: mod_base = OTHER; note = uracil
  modified_base 40..41: mod_base = OTHER; note = uracil
  modified_base 47: mod_base = OTHER; note = uracil
  modified_base 51: mod_base = OTHER; note = uracil
  modified_base 56..57: mod_base = OTHER; note = uracil
  modified_base 60: mod_base = OTHER; note = uracil
  modified_base 63: mod_base = OTHER; note = uracil
  modified_base 67: mod_base = OTHER; note = uracil
  modified_base 74..75: mod_base = OTHER; note = uracil
  modified_base 77: mod_base = OTHER; note = uracil
  modified_base 83: mod_base = OTHER; note = uracil
  modified_base 85..87: mod_base = OTHER; note = uracil
  modified_base 89..90: mod_base = OTHER; note = uracil
  modified_base 93..94: mod_base = OTHER; note = uracil
  modified_base 96: mod_base = OTHER; note = uracil
  modified_base 107..108: mod_base = OTHER; note = uracil
  modified_base 115: mod_base = OTHER; note = uracil
  modified_base 117..122: mod_base = OTHER; note = uracil
  modified_base 126..127: mod_base = OTHER; note = uracil
  modified_base 129: mod_base = OTHER; note = uracil
  modified_base 134..136: mod_base = OTHER; note = uracil
  modified_base 139: mod_base = OTHER; note = uracil
  modified_base 145: mod_base = OTHER; note = uracil
  modified_base 147: mod_base = OTHER; note = uracil
  modified_base 152: mod_base = OTHER; note = uracil
  modified_base 154..155: mod_base = OTHER; note = uracil
  modified_base 160..161: mod_base = OTHER; note = uracil
  modified_base 163: mod_base = OTHER; note = uracil
  modified_base 166..168: mod_base = OTHER; note = uracil
  modified_base 170..173: mod_base = OTHER; note = uracil
  modified_base 175..177: mod_base = OTHER; note = uracil
  modified_base 180: mod_base = OTHER; note = uracil
  modified_base 189: mod_base = OTHER; note = uracil
  modified_base 195..196: mod_base = OTHER; note = uracil
  modified_base 198..199: mod_base = OTHER; note = uracil
  modified_base 201: mod_base = OTHER; note = uracil
  modified_base 204..205: mod_base = OTHER; note = uracil
  modified_base 207..208: mod_base = OTHER; note = uracil
  modified_base 210..211: mod_base = OTHER; note = uracil
  modified_base 215: mod_base = OTHER; note = uracil
  modified_base 217..218: mod_base = OTHER; note = uracil
  modified_base 220: mod_base = OTHER; note = uracil
  modified_base 229: mod_base = OTHER; note = uracil
  modified_base 233: mod_base = OTHER; note = uracil
  modified_base 237: mod_base = OTHER; note = uracil
  modified_base 239..240: mod_base = OTHER; note = uracil
  modified_base 243..244: mod_base = OTHER; note = uracil
  modified_base 251..252: mod_base = OTHER; note = uracil
  modified_base 256: mod_base = OTHER; note = uracil
  modified_base 263: mod_base = OTHER; note = uracil
  modified_base 268: mod_base = OTHER; note = uracil
  modified_base 272..273: mod_base = OTHER; note = uracil
  modified_base 280..281: mod_base = OTHER; note = uracil
  modified_base 284: mod_base = OTHER; note = uracil
  modified_base 287..289: mod_base = OTHER; note = uracil
  modified_base 297..299: mod_base = OTHER; note = uracil
  modified_base 48: mod_base = m5c
  modified_base 158: mod_base = m5c
  modified_base 186: mod_base = m5c
  modified_base 221: mod_base = m5c
  modified_base 246: mod_base = m5c
  modified_base 274: mod_base = m5c
  modified_base 295: mod_base = m5c
  variation 149: note = CpG site, residue is C if methylated or T(=U) if unmethylated
ttttttttttattttttatagatatttttattttggtattttgagttcggtttgttttttttttgtttagaagtttttgtggtttttattttttttagagtaaaagttaaagttttttttttagattttaaggttttgtttggttttayggtattatcgttttttttttttttattttgtttaatcgatttaggttattttagttttttttaagttttttcggtgagttagataggtttttgtttcggggtttgtttaaaggttgtgttttttcggggattatttttttagagacgttta

SEQ ID NO: 361 - DNA, 300 bp, synthetic construct
  source 1..300: mol_type = other DNA
  modified_base 3: mod_base = OTHER; note = uracil
  modified_base 13..14: mod_base = OTHER; note = uracil
  modified_base 17..18: mod_base = OTHER; note = uracil
  modified_base 32: mod_base = OTHER; note = uracil
  modified_base 34: mod_base = OTHER; note = uracil
  modified_base 39: mod_base = OTHER; note = uracil
  modified_base 44: mod_base = OTHER; note = uracil
  modified_base 48: mod_base = OTHER; note = uracil
  modified_base 50..52: mod_base = OTHER; note = uracil
  modified_base 55: mod_base = OTHER; note = uracil
  modified_base 70: mod_base = OTHER; note = uracil
  modified_base 77: mod_base = OTHER; note = uracil
  modified_base 80: mod_base = OTHER; note = uracil
  modified_base 91: mod_base = OTHER; note = uracil
  modified_base 94..97: mod_base = OTHER; note = uracil
  modified_base 102: mod_base = OTHER; note = uracil
  modified_base 108..109: mod_base = OTHER; note = uracil
  modified_base 111: mod_base = OTHER; note = uracil
  modified_base 113: mod_base = OTHER; note = uracil
  modified_base 117..119: mod_base = OTHER; note = uracil
  modified_base 121: mod_base = OTHER; note = uracil
  modified_base 126..127: mod_base = OTHER; note = uracil
  modified_base 135: mod_base = OTHER; note = uracil
  modified_base 141: mod_base = OTHER; note = uracil
  modified_base 153: mod_base = OTHER; note = uracil
  modified_base 155: mod_base = OTHER; note = uracil
  modified_base 161: mod_base = OTHER; note = uracil
  modified_base 163: mod_base = OTHER; note = uracil
  modified_base 168: mod_base = OTHER; note = uracil
  modified_base 174..175: mod_base = OTHER; note = uracil
  modified_base 181..182: mod_base = OTHER; note = uracil
  modified_base 185: mod_base = OTHER; note = uracil
  modified_base 188: mod_base = OTHER; note = uracil
  modified_base 191: mod_base = OTHER; note = uracil
  modified_base 196: mod_base = OTHER; note = uracil
  modified_base 206: mod_base = OTHER; note = uracil
  modified_base 211: mod_base = OTHER; note = uracil
  modified_base 215: mod_base = OTHER; note = uracil
  modified_base 217: mod_base = OTHER; note = uracil
  modified_base 223: mod_base = OTHER; note = uracil
  modified_base 227: mod_base = OTHER; note = uracil
  modified_base 232: mod_base = OTHER; note = uracil
  modified_base 236: mod_base = OTHER; note = uracil
  modified_base 243..244: mod_base = OTHER; note = uracil
  modified_base 246: mod_base = OTHER; note = uracil
  modified_base 254: mod_base = OTHER; note = uracil
  modified_base 258: mod_base = OTHER; note = uracil
  modified_base 266..267: mod_base = OTHER; note = uracil
  modified_base 278..281: mod_base = OTHER; note = uracil
  modified_base 284: mod_base = OTHER; note = uracil
  modified_base 286..287: mod_base = OTHER; note = uracil
  modified_base 293..295: mod_base = OTHER; note = uracil
  modified_base 45: mod_base = m5c
  modified_base 57: mod_base = m5c
  modified_base 71: mod_base = m5c
  modified_base 170: mod_base = m5c
  modified_base 183: mod_base = m5c
  modified_base 192: mod_base = m5c
  modified_base 212: mod_base = m5c
  modified_base 220: mod_base = m5c
  modified_base 230: mod_base = m5c
  modified_base 233: mod_base = m5c
  modified_base 252: mod_base = m5c
  modified_base 268: mod_base = m5c
  variation 145: note = CpG site, residue is C if methylated or T(=U) if unmethylated
  variation 158: note = CpG site, residue is C if methylated or T(=U) if unmethylated
ggttttgtgaaattaattaggaagaatgaaatatagagttggttcgatatttagttcgagggaggggggtcggaagtttttggaagttggttgtttttaagtaggggttattttagtttataaggttaagttggtagaggtagaygaggggattttgyggtttaagttacgggttaggagttcgtagttgtcgggttggaaaggttagagtcggttttgcgtttggttgcgtcggtaagaagttataattacgtaggtaaaagagttcggggattagttttagtatttgggattttgaat

SEQ ID NO: 362 - DNA, 300 bp, synthetic construct
  source 1..300: mol_type = other DNA
  modified_base 4: mod_base = OTHER; note = uracil
  modified_base 10..12: mod_base = OTHER; note = uracil
  modified_base 18: mod_base = OTHER; note = uracil
  modified_base 24: mod_base = OTHER; note = uracil
  modified_base 29..31: mod_base = OTHER; note = uracil
  modified_base 36: mod_base = OTHER; note = uracil
  modified_base 38: mod_base = OTHER; note = uracil
  modified_base 44..45: mod_base = OTHER; note = uracil
  modified_base 59: mod_base = OTHER; note = uracil
  modified_base 62: mod_base = OTHER; note = uracil
  modified_base 66: mod_base = OTHER; note = uracil
  modified_base 72: mod_base = OTHER; note = uracil
  modified_base 75..76: mod_base = OTHER; note = uracil
  modified_base 82: mod_base = OTHER; note = uracil
  modified_base 87: mod_base = OTHER; note = uracil
  modified_base 91: mod_base = OTHER; note = uracil
  modified_base 93: mod_base = OTHER; note = uracil
  modified_base 97..98: mod_base = OTHER; note = uracil
  modified_base 102..103: mod_base = OTHER; note = uracil
  modified_base 106..107: mod_base = OTHER; note = uracil
  modified_base 111: mod_base = OTHER; note = uracil
  modified_base 114: mod_base = OTHER; note = uracil
  modified_base 121: mod_base = OTHER; note = uracil
  modified_base 123..124: mod_base = OTHER; note = uracil
  modified_base 128..129: mod_base = OTHER; note = uracil
  modified_base 135: mod_base = OTHER; note = uracil
  modified_base 141: mod_base = OTHER; note = uracil
  modified_base 144: mod_base = OTHER; note = uracil
  modified_base 150..153: mod_base = OTHER; note = uracil
  modified_base 158: mod_base = OTHER; note = uracil
  modified_base 161..162: mod_base = OTHER; note = uracil
  modified_base 164: mod_base = OTHER; note = uracil
  modified_base 167..168: mod_base = OTHER; note = uracil
  modified_base 171: mod_base = OTHER; note = uracil
  modified_base 176..177: mod_base = OTHER; note = uracil
  modified_base 185: mod_base = OTHER; note = uracil
  modified_base 194..197: mod_base = OTHER; note = uracil
  modified_base 200: mod_base = OTHER; note = uracil
  modified_base 208: mod_base = OTHER; note = uracil
  modified_base 211..212: mod_base = OTHER; note = uracil
  modified_base 215: mod_base = OTHER; note = uracil
  modified_base 218..219: mod_base = OTHER; note = uracil
  modified_base 225: mod_base = OTHER; note = uracil
  modified_base 228: mod_base = OTHER; note = uracil
  modified_base 232..237: mod_base = OTHER; note = uracil
  modified_base 239..241: mod_base = OTHER; note = uracil
  modified_base 247: mod_base = OTHER; note = uracil
  modified_base 259..260: mod_base = OTHER; note = uracil
  modified_base 263: mod_base = OTHER; note = uracil
  modified_base 265: mod_base = OTHER; note = uracil
  modified_base 273: mod_base = OTHER; note = uracil
  modified_base 277: mod_base = OTHER; note = uracil
  modified_base 280..281: mod_base = OTHER; note = uracil
  modified_base 292: mod_base = OTHER; note = uracil
  modified_base 294: mod_base = OTHER; note = uracil
  modified_base 299..300: mod_base = OTHER; note = uracil
  modified_base 32: mod_base = m5c
  modified_base 48: mod_base = m5c
  modified_base 67: mod_base = m5c
  modified_base 70: mod_base = m5c
  modified_base 80: mod_base = m5c
  modified_base 88: mod_base = m5c
  modified_base 108: mod_base = m5c
  modified_base 117: mod_base = m5c
  modified_base 130: mod_base = m5c
  modified_base 229: mod_base = m5c
  modified_base 243: mod_base = m5c
  modified_base 255: mod_base = m5c
  variation 142: note = CpG site, residue is C if methylated or T(=U) if unmethylated
  variation 155: note = CpG site, residue is C if methylated or T(=U) if unmethylated
atttagggttttaggtgttggggttaattttcgggtttttttgtttgcgtaattgtggttttttgtcggcgtagttagacgtagagtcggttttgatttttttagttcggtagttgcgggtttttggttcgtgatttgagtygtagagttttttygtttgtttttgttaatttggttttgtgggttagagtggtttttgtttaggggtagttaatttttagaagttttcggtttttttttttcgagttgggtgtcggattagttttgtgttttattttttttggttggttttataaagtt

SEQ ID NO: 363 - DNA, 300 bp, synthetic construct
  source 1..300: mol_type = other DNA
  modified_base 4: mod_base = OTHER; note = uracil
  modified_base 21: mod_base = OTHER; note = uracil
  modified_base 26..28: mod_base = OTHER; note = uracil
  modified_base 39: mod_base = OTHER; note = uracil
  modified_base 45: mod_base = OTHER; note = uracil
  modified_base 50: mod_base = OTHER; note = uracil
  modified_base 55..56: mod_base = OTHER; note = uracil
  modified_base 62: mod_base = OTHER; note = uracil
  modified_base 64: mod_base = OTHER; note = uracil
  modified_base 66: mod_base = OTHER; note = uracil
  modified_base 69: mod_base = OTHER; note = uracil
  modified_base 72: mod_base = OTHER; note = uracil
  modified_base 74..76: mod_base = OTHER; note = uracil
  modified_base 80: mod_base = OTHER; note = uracil
  modified_base 83: mod_base = OTHER; note = uracil
  modified_base 91: mod_base = OTHER; note = uracil
  modified_base 105: mod_base = OTHER; note = uracil
  modified_base 107: mod_base = OTHER; note = uracil
  modified_base 111..112: mod_base = OTHER; note = uracil
  modified_base 120: mod_base = OTHER; note = uracil
  modified_base 124: mod_base = OTHER; note = uracil
  modified_base 126: mod_base = OTHER; note = uracil
  modified_base 134: mod_base = OTHER; note = uracil
  modified_base 138: mod_base = OTHER; note = uracil
  modified_base 142: mod_base = OTHER; note = uracil
  modified_base 144: mod_base = OTHER; note = uracil
  modified_base 147..149: mod_base = OTHER; note = uracil
  modified_base 152: mod_base = OTHER; note = uracil
  modified_base 154: mod_base = OTHER; note = uracil
  modified_base 159: mod_base = OTHER; note = uracil
  modified_base 162: mod_base = OTHER; note = uracil
  modified_base 166..167: mod_base = OTHER; note = uracil
  modified_base 170: mod_base = OTHER; note = uracil
  modified_base 174..177: mod_base = OTHER; note = uracil
  modified_base 180: mod_base = OTHER; note = uracil
  modified_base 186: mod_base = OTHER; note = uracil
  modified_base 191: mod_base = OTHER; note = uracil
  modified_base 193..194: mod_base = OTHER; note = uracil
  modified_base 196: mod_base = OTHER; note = uracil
  modified_base 200..201: mod_base = OTHER; note = uracil
  modified_base 206: mod_base = OTHER; note = uracil
  modified_base 208: mod_base = OTHER; note = uracil
  modified_base 217..219: mod_base = OTHER; note = uracil
  modified_base 224..225: mod_base = OTHER; note = uracil
  modified_base 228..230: mod_base = OTHER; note = uracil
  modified_base 235..236: mod_base = OTHER; note = uracil
  modified_base 240: mod_base = OTHER; note = uracil
  modified_base 242: mod_base = OTHER; note = uracil
  modified_base 252: mod_base = OTHER; note = uracil
  modified_base 260..261: mod_base = OTHER; note = uracil
  modified_base 291: mod_base = OTHER; note = uracil
  modified_base 297..298: mod_base = OTHER; note = uracil
  modified_base 9: mod_base = m5c
  modified_base 31: mod_base = m5c
  modified_base 48: mod_base = m5c
  modified_base 57: mod_base = m5c
  modified_base 77: mod_base = m5c
  modified_base 181: mod_base = m5c
  modified_base 209: mod_base = m5c
  modified_base 248: mod_base = m5c
  modified_base 263: mod_base = m5c
  variation 150: note = CpG site, residue is C if methylated or T(=U) if unmethylated
aggttgaacggaattgggagtagagttttgcggtaggatagagatttcgtaaagttcggagtatatagtagtatttcgttttttaaaggataattttgggaaaatttttgtttaatattttggtattaaggattattttgttatattttygttttggattataagtttgtaagttttattcggggtagggttttttatttttgtgtatcgtggaagttttgtgtttgtttagggtttggtatttgtacgtatttgaaaatttcgtgtggagtaaagagaggggtgatgtgtaaaggtttt

SEQ ID NO: 364 - DNA, 300 bp, synthetic construct
  source 1..300: mol_type = other DNA
  modified_base 5..6: mod_base = OTHER; note = uracil
  modified_base 11: mod_base = OTHER; note = uracil
  modified_base 13: mod_base = OTHER; note = uracil
  modified_base 16: mod_base = OTHER; note = uracil
  modified_base 18..21: mod_base = OTHER; note = uracil
  modified_base 23: mod_base = OTHER; note = uracil
  modified_base 25: mod_base = OTHER; note = uracil
  modified_base 30: mod_base = OTHER; note = uracil
  modified_base 32..33: mod_base = OTHER; note = uracil
  modified_base 35: mod_base = OTHER; note = uracil
  modified_base 46: mod_base = OTHER; note = uracil
  modified_base 56: mod_base = OTHER; note = uracil
  modified_base 62..63: mod_base = OTHER; note = uracil
  modified_base 67..69: mod_base = OTHER; note = uracil
  modified_base 74: mod_base = OTHER; note = uracil
  modified_base 78: mod_base = OTHER; note = uracil
  modified_base 80: mod_base = OTHER; note = uracil
  modified_base 85: mod_base = OTHER; note = uracil
  modified_base 88..89: mod_base = OTHER; note = uracil
  modified_base 96: mod_base = OTHER; note = uracil
  modified_base 98: mod_base = OTHER; note = uracil
  modified_base 111..113: mod_base = OTHER; note = uracil
  modified_base 116..118: mod_base = OTHER; note = uracil
  modified_base 128: mod_base = OTHER; note = uracil
  modified_base 132: mod_base = OTHER; note = uracil
  modified_base 136: mod_base = OTHER; note = uracil
  modified_base 144..145: mod_base = OTHER; note = uracil
  modified_base 161: mod_base = OTHER; note = uracil
  modified_base 170..171: mod_base = OTHER; note = uracil
  modified_base 178..179: mod_base = OTHER; note = uracil
  modified_base 191: mod_base = OTHER; note = uracil
  modified_base 201..203: mod_base = OTHER; note = uracil
  modified_base 212..213: mod_base = OTHER; note = uracil
  modified_base 230: mod_base = OTHER; note = uracil
  modified_base 233: mod_base = OTHER; note = uracil
  modified_base 240: mod_base = OTHER; note = uracil
  modified_base 242: mod_base = OTHER; note = uracil
  modified_base 247: mod_base = OTHER; note = uracil
  modified_base 258: mod_base = OTHER; note = uracil
  modified_base 260: mod_base = OTHER; note = uracil
  modified_base 264..265: mod_base = OTHER; note = uracil
  modified_base 268: mod_base = OTHER; note = uracil
  modified_base 271: mod_base = OTHER; note = uracil
  modified_base 276: mod_base = OTHER; note = uracil
  modified_base 278: mod_base = OTHER; note = uracil
  modified_base 281: mod_base = OTHER; note = uracil
  modified_base 283..285: mod_base = OTHER; note = uracil
  modified_base 290: mod_base = OTHER; note = uracil
  modified_base 295: mod_base = OTHER; note = uracil
  modified_base 298..299: mod_base = OTHER; note = uracil
  modified_base 37: mod_base = m5c
  modified_base 52: mod_base = m5c
  modified_base 91: mod_base = m5c
  modified_base 119: mod_base = m5c
  modified_base 223: mod_base = m5c
  modified_base 243: mod_base = m5c
  modified_base 252: mod_base = m5c
  modified_base 269: mod_base = m5c
  modified_base 291: mod_base = m5c
  variation 150: note = CpG site, residue is C if methylated or T(=U) if unmethylated
aaggtttttgtatattatttttttttttattttatacgaggtttttaagtacgtataagtgttaggttttgggtaggtatagggtttttacggtgtataggaatgaggagttttgtttcggatggggtttgtaggtttgtagtttagagyggggatgtgatagaatgatttttagtgttagaatattaggtaagagtttttttaaaattgttttttagaagacggggtgttgttgtgtgtttcgggttttgcgaagtttttgttttatcgtagggttttgtttttaatttcgtttagttt

SEQ ID NO: 365 - DNA, 300 bp, synthetic construct
  source 1..300: mol_type = other DNA
  modified_base 3..4: mod_base = OTHER; note = uracil
  modified_base 8: mod_base = OTHER; note = uracil
  modified_base 13..14: mod_base = OTHER; note = uracil
  modified_base 22..24: mod_base = OTHER; note = uracil
  modified_base 34..36: mod_base = OTHER; note = uracil
  modified_base 41: mod_base = OTHER; note = uracil
  modified_base 79: mod_base = OTHER; note = uracil
  modified_base 84: mod_base = OTHER; note = uracil
  modified_base 86: mod_base = OTHER; note = uracil
  modified_base 93: mod_base = OTHER; note = uracil
  modified_base 116: mod_base = OTHER; note = uracil
  modified_base 132..133: mod_base = OTHER; note = uracil
  modified_base 137: mod_base = OTHER; note = uracil
  modified_base 143: mod_base = OTHER; note = uracil
  modified_base 147: mod_base = OTHER; note = uracil
  modified_base 150: mod_base = OTHER; note = uracil
  modified_base 156: mod_base = OTHER; note = uracil
  modified_base 160: mod_base = OTHER; note = uracil
  modified_base 166: mod_base = OTHER; note = uracil
  modified_base 182: mod_base = OTHER; note = uracil
  modified_base 188: mod_base = OTHER; note = uracil
  modified_base 195: mod_base = OTHER; note = uracil
  modified_base 205..207: mod_base = OTHER; note = uracil
  modified_base 210: mod_base = OTHER; note = uracil
  modified_base 215: mod_base = OTHER; note = uracil
  modified_base 225..226: mod_base = OTHER; note = uracil
  modified_base 230..232: mod_base = OTHER; note = uracil
  modified_base 238: mod_base = OTHER; note = uracil
  modified_base 248: mod_base = OTHER; note = uracil
  modified_base 253..254: mod_base = OTHER; note = uracil
  modified_base 258: mod_base = OTHER; note = uracil
  modified_base 261: mod_base = OTHER; note = uracil
  modified_base 270: mod_base = OTHER; note = uracil
  modified_base 281: mod_base = OTHER; note = uracil
  modified_base 284..285: mod_base = OTHER; note = uracil
  modified_base 294: mod_base = OTHER; note = uracil
  modified_base 297: mod_base = OTHER; note = uracil
  modified_base 17: mod_base = m5c
  modified_base 61: mod_base = m5c
  modified_base 89: mod_base = m5c
  modified_base 95: mod_base = m5c
  modified_base 107: mod_base = m5c
  modified_base 117: mod_base = m5c
  modified_base 125: mod_base = m5c
  modified_base 157: mod_base = m5c
  modified_base 167: mod_base = m5c
  modified_base 170: mod_base = m5c
  modified_base 184: mod_base = m5c
  modified_base 199: mod_base = m5c
  modified_base 212: mod_base = m5c
  modified_base 242: mod_base = m5c
  modified_base 249: mod_base = m5c
  modified_base 251: mod_base = m5c
  modified_base 265: mod_base = m5c
  modified_base 288: mod_base = m5c
  modified_base 292: mod_base = m5c
  modified_base 298: mod_base = m5c
  variation 151: note = CpG site, residue is C if methylated or T(=U) if unmethylated
agttaggttaaattagcgtgttttaatgaggggttttgggttgagtggaggaaatgggtgcggtggaggtgggtttggttgggtatagcgggtacgtgtgggtaagcgggtggggtcggttgtgcgggtggtttatttggggtaagtagtygaggtcgattgtgttcggcgtgtggttgagtacgggtaggtgtttggcggtgattttgtacgtttggtgtttatttggttttgggtttgacgtgggtcgcgtttggttgttggcgggatagtgtgttatttgtttgcggacgttttcgg

SEQ ID NO: 366 - DNA, 300 bp, synthetic construct
  source 1..300: mol_type = other DNA
  modified_base 1: mod_base = OTHER; note = uracil
  modified_base 11: mod_base = OTHER; note = uracil
  modified_base 14: mod_base = OTHER; note = uracil
  modified_base 18: mod_base = OTHER; note = uracil
  modified_base 25: mod_base = OTHER; note = uracil
  modified_base 27: mod_base = OTHER; note = uracil
  modified_base 29: mod_base = OTHER; note = uracil
  modified_base 33..34: mod_base = OTHER; note = uracil
  modified_base 37..38: mod_base = OTHER; note = uracil
  modified_base 41: mod_base = OTHER; note = uracil
  modified_base 44..45: mod_base = OTHER; note = uracil
  modified_base 54..56: mod_base = OTHER; note = uracil
  modified_base 61: mod_base = OTHER; note = uracil
  modified_base 65..67: mod_base = OTHER; note = uracil
  modified_base 72..73: mod_base = OTHER; note = uracil
  modified_base 81: mod_base = OTHER; note = uracil
  modified_base 83..84: mod_base = OTHER; note = uracil
  modified_base 92: mod_base = OTHER; note = uracil
  modified_base 98: mod_base = OTHER; note = uracil
  modified_base 100: mod_base = OTHER; note = uracil
  modified_base 103..104: mod_base = OTHER; note = uracil
  modified_base 108: mod_base = OTHER; note = uracil
  modified_base 110..111: mod_base = OTHER; note = uracil
  modified_base 114..115: mod_base = OTHER; note = uracil
  modified_base 120: mod_base = OTHER; note = uracil
  modified_base 122: mod_base = OTHER; note = uracil
  modified_base 125..126: mod_base = OTHER; note = uracil
  modified_base 128: mod_base = OTHER; note = uracil
  modified_base 132: mod_base = OTHER; note = uracil
  modified_base 137: mod_base = OTHER; note = uracil
  modified_base 139: mod_base = OTHER; note = uracil
  modified_base 146..147: mod_base = OTHER; note = uracil
  modified_base 152: mod_base = OTHER; note = uracil
  modified_base 155: mod_base = OTHER; note = uracil
  modified_base 159..162: mod_base = OTHER; note = uracil
  modified_base 170..171: mod_base = OTHER; note = uracil
  modified_base 173..174: mod_base = OTHER; note = uracil
  modified_base 177: mod_base = OTHER; note = uracil
  modified_base 179: mod_base = OTHER; note = uracil
  modified_base 182: mod_base = OTHER; note = uracil
  modified_base 186..189: mod_base = OTHER; note = uracil
  modified_base 191..192: mod_base = OTHER; note = uracil
  modified_base 195: mod_base = OTHER; note = uracil
  modified_base 199..201: mod_base = OTHER; note = uracil
  modified_base 203: mod_base = OTHER; note = uracil
  modified_base 209..210: mod_base = OTHER; note = uracil
  modified_base 213: mod_base = OTHER; note = uracil
  modified_base 218..220: mod_base = OTHER; note = uracil
  modified_base 223..224: mod_base = OTHER; note = uracil
  modified_base 228..230: mod_base = OTHER; note = uracil
  modified_base 232..233: mod_base = OTHER; note = uracil
  modified_base 235..236: mod_base = OTHER; note = uracil
  modified_base 238: mod_base = OTHER; note = uracil
  modified_base 241: mod_base = OTHER; note = uracil
  modified_base 243..245: mod_base = OTHER; note = uracil
  modified_base 250..251: mod_base = OTHER; note = uracil
  modified_base 253..254: mod_base = OTHER; note = uracil
  modified_base 256: mod_base = OTHER; note = uracil
  modified_base 258: mod_base = OTHER; note = uracil
  modified_base 261..263: mod_base = OTHER; note = uracil
  modified_base 268..271: mod_base = OTHER; note = uracil
  modified_base 273: mod_base = OTHER; note = uracil
  modified_base 281: mod_base = OTHER; note = uracil
  modified_base 285: mod_base = OTHER; note = uracil
  modified_base 294..295: mod_base = OTHER; note = uracil
  modified_base 299: mod_base = OTHER; note = uracil
  modified_base 2: mod_base = m5c
  modified_base 8: mod_base = m5c
  modified_base 12: mod_base = m5c
  modified_base 35: mod_base = m5c
  modified_base 49: mod_base = m5c
  modified_base 51: mod_base = m5c
  modified_base 58: mod_base = m5c
  modified_base 88: mod_base = m5c
  modified_base 101: mod_base = m5c
  modified_base 116: mod_base = m5c
  modified_base 130: mod_base = m5c
  modified_base 133: mod_base = m5c
  modified_base 143: mod_base = m5c
  modified_base 175: mod_base = m5c
  modified_base 183: mod_base = m5c
  modified_base 193: mod_base = m5c
  modified_base 205: mod_base = m5c
  modified_base 211: mod_base = m5c
  modified_base 239: mod_base = m5c
  modified_base 283: mod_base = m5c
  variation 149: note = CpG site, residue is C if methylated or T(=U) if unmethylated
tcggaagcgttcgtaggtagataatatattgtttcgttagtagttaggcgcggtttacgttagatttagggttaggtaaatattagacgtgtagggttatcgttagatatttgttcgtgtttaattatacgtcggatatagtcggtttyggttgtttgttttagataggttattcgtataatcggttttattcgtttatttatacgtgttcgttgtgtttagttaaatttatttttatcgtatttattttttttatttagtttagggttttttattgggatacgttggtttagtttggtt

SEQ ID NO: 367 - DNA, 300 bp, synthetic construct
  source 1..300: mol_type = other DNA
  modified_base 1..2: mod_base = OTHER; note = uracil
  modified_base 7: mod_base = OTHER; note = uracil
  modified_base 9: mod_base = OTHER; note = uracil
  modified_base 26: mod_base = OTHER; note = uracil
  modified_base 33: mod_base = OTHER; note = uracil
  modified_base 49: mod_base = OTHER; note = uracil
  modified_base 56: mod_base = OTHER; note = uracil
  modified_base 64: mod_base = OTHER; note = uracil
  modified_base 67: mod_base = OTHER; note = uracil
  modified_base 72: mod_base = OTHER; note = uracil
  modified_base 74..75: mod_base = OTHER; note = uracil
  modified_base 77: mod_base = OTHER; note = uracil
  modified_base 86: mod_base = OTHER; note = uracil
  modified_base 93: mod_base = OTHER; note = uracil
  modified_base 101: mod_base = OTHER; note = uracil
  modified_base 117: mod_base = OTHER; note = uracil
  modified_base 121..122: mod_base = OTHER; note = uracil
  modified_base 125: mod_base = OTHER; note = uracil
  modified_base 132..133: mod_base = OTHER; note = uracil
  modified_base 138..139: mod_base = OTHER; note = uracil
  modified_base 142: mod_base = OTHER; note = uracil
  modified_base 145..147: mod_base = OTHER; note = uracil
  modified_base 150: mod_base = OTHER; note = uracil
  modified_base 153: mod_base = OTHER; note = uracil
  modified_base 155..156: mod_base = OTHER; note = uracil
  modified_base 162: mod_base = OTHER; note = uracil
  modified_base 164: mod_base = OTHER; note = uracil
  modified_base 177..179: mod_base = OTHER; note = uracil
  modified_base 197: mod_base = OTHER; note = uracil
  modified_base 203: mod_base = OTHER; note = uracil
  modified_base 205: mod_base = OTHER; note = uracil
  modified_base 208: mod_base = OTHER; note = uracil
  modified_base 211..212: mod_base = OTHER; note = uracil
  modified_base 218..220: mod_base = OTHER; note = uracil
  modified_base 223: mod_base = OTHER; note = uracil
  modified_base 225..227: mod_base = OTHER; note = uracil
  modified_base 229..230: mod_base = OTHER; note = uracil
  modified_base 234: mod_base = OTHER; note = uracil
  modified_base 236: mod_base = OTHER; note = uracil
  modified_base 243: mod_base = OTHER; note = uracil
  modified_base 246..247: mod_base = OTHER; note = uracil
  modified_base 249..250: mod_base = OTHER; note = uracil
  modified_base 252..254: mod_base = OTHER; note = uracil
  modified_base 256: mod_base = OTHER; note = uracil
  modified_base 260..261: mod_base = OTHER; note = uracil
  modified_base 265: mod_base = OTHER; note = uracil
  modified_base 267: mod_base = OTHER; note = uracil
  modified_base 271: mod_base = OTHER; note = uracil
  modified_base 273..274: mod_base = OTHER; note = uracil
  modified_base 277: mod_base = OTHER; note = uracil
  modified_base 279..280: mod_base = OTHER; note = uracil
  modified_base 282..283: mod_base = OTHER; note = uracil
  modified_base 285..288: mod_base = OTHER; note = uracil
  modified_base 290..292: mod_base = OTHER; note = uracil
  modified_base 294..295: mod_base = OTHER; note = uracil
  modified_base 298..300: mod_base = OTHER; note = uracil
  modified_base 23: mod_base = m5c
  modified_base 44: mod_base = m5c
  modified_base 68: mod_base = m5c
  modified_base 70: mod_base = m5c
  modified_base 78: mod_base = m5c
  modified_base 90: mod_base = m5c
  modified_base 96: mod_base = m5c
  modified_base 98: mod_base = m5c
  modified_base 102: mod_base = m5c
  modified_base 104: mod_base = m5c
  modified_base 108: mod_base = m5c
  modified_base 114: mod_base = m5c
  modified_base 123: mod_base = m5c
  modified_base 134: mod_base = m5c
  modified_base 165: mod_base = m5c
  modified_base 168: mod_base = m5c
  modified_base 170: mod_base = m5c
  modified_base 172: mod_base = m5c
  modified_base 186: mod_base = m5c
  modified_base 192: mod_base = m5c
  modified_base 199: mod_base = m5c
  modified_base 213: mod_base = m5c
  modified_base 239: mod_base = m5c
  variation 151: note = CpG site, residue is C if methylated or T(=U) if unmethylated
ttttggtttaggttggggagggcgttatgagttatgaggtgggcgttgtatttgttagttgtgtagtcgcgtattatcgagtagtttggcggtagcgcgttcgcgttcgattgcgtttggttcgtaggaggttcggtttagtagttttttygtattagggttatcggcgcgcgatattttgggggcgggatcggggttcgtgttttgtttttcgaaatttttttttttttagttttagcgtttttttttttttttttatttttttatttttatttatatttttttttttttttttttttt

SEQ ID NO: 368 - DNA, 300 bp, synthetic construct
  source 1..300: mol_type = other DNA
  modified_base 63: mod_base = OTHER; note = uracil
  modified_base 69: mod_base = OTHER; note = uracil
  modified_base 94: mod_base = OTHER; note = uracil
  modified_base 99: mod_base = OTHER; note = uracil
  modified_base 105..107: mod_base = OTHER; note = uracil
  modified_base 112..113: mod_base = OTHER; note = uracil
  modified_base 116..120: mod_base = OTHER; note = uracil
  modified_base 134: mod_base = OTHER; note = uracil
  modified_base 141..143: mod_base = OTHER; note = uracil
  modified_base 157: mod_base = OTHER; note = uracil
  modified_base 160: mod_base = OTHER; note = uracil
  modified_base 165: mod_base = OTHER; note = uracil
  modified_base 170..171: mod_base = OTHER; note = uracil
  modified_base 173..174: mod_base = OTHER; note = uracil
  modified_base 181..182: mod_base = OTHER; note = uracil
  modified_base 188: mod_base = OTHER; note = uracil
  modified_base 206: mod_base = OTHER; note = uracil
  modified_base 209: mod_base = OTHER; note = uracil
  modified_base 212..213: mod_base = OTHER; note = uracil
  modified_base 217: mod_base = OTHER; note = uracil
  modified_base 220: mod_base = OTHER; note = uracil
  modified_base 235: mod_base = OTHER; note = uracil
  modified_base 238: mod_base = OTHER; note = uracil
  modified_base 240: mod_base = OTHER; note = uracil
  modified_base 243: mod_base = OTHER; note = uracil
  modified_base 247: mod_base = OTHER; note = uracil
  modified_base 253: mod_base = OTHER; note = uracil
  modified_base 258..260: mod_base = OTHER; note = uracil
  modified_base 262..263: mod_base = OTHER; note = uracil
  modified_base 265: mod_base = OTHER; note = uracil
  modified_base 270: mod_base = OTHER; note = uracil
  modified_base 272: mod_base = OTHER; note = uracil
  modified_base 279..281: mod_base = OTHER; note = uracil
  modified_base 283..286: mod_base = OTHER; note = uracil
  modified_base 289..290: mod_base = OTHER; note = uracil
  modified_base 295..296: mod_base = OTHER; note = uracil
  modified_base 61: mod_base = m5c
  modified_base 87: mod_base = m5c
  modified_base 101: mod_base = m5c
  modified_base 108: mod_base = m5c
  modified_base 114: mod_base = m5c
  modified_base 128: mod_base = m5c
  modified_base 130: mod_base = m5c
  modified_base 132: mod_base = m5c
  modified_base 135: mod_base = m5c
  modified_base 166: mod_base = m5c
  modified_base 177: mod_base = m5c
  modified_base 186: mod_base = m5c
  modified_base 192: mod_base = m5c
  modified_base 196: mod_base = m5c
  modified_base 198: mod_base = m5c
  modified_base 202: mod_base = m5c
  modified_base 204: mod_base = m5c
  modified_base 210: mod_base = m5c
  modified_base 222: mod_base = m5c
  modified_base 230: mod_base = m5c
  modified_base 232: mod_base = m5c
  modified_base 256: mod_base = m5c
  modified_base 277: mod_base = m5c
  variation 149: note = CpG site, residue is C if methylated or T(=U) if unmethylated
gggaaggagggaggggaggaggtgtaggtgaaagtgaaaggatagagggaggaggaagaacgttgagattggagggagaagggtttcgggaagtagagtacgagtttcgatttcgtttttagggtatcgcgcgtcggtgattttggtgyggaagggttgttggatcgggttttttgcgggttagacgtaatcgaacgcggacgcgttgtcgttagattattcggtggtgcgcggttgtataattgataaatgtaacgtttattttatgatttatgacgttttttttaatttgagttaagg

SEQ ID NO: 369 - DNA, 300 bp, synthetic construct
  source 1..300: mol_type = other DNA
  modified_base 1: mod_base = OTHER; note = uracil
  modified_base 5: mod_base = OTHER; note = uracil
  modified_base 13: mod_base = OTHER; note = uracil
  modified_base 25: mod_base = OTHER; note = uracil
  modified_base 30: mod_base = OTHER; note = uracil
  modified_base 32: mod_base = OTHER; note = uracil
  modified_base 34: mod_base = OTHER; note = uracil
  modified_base 37: mod_base = OTHER; note = uracil
  modified_base 40: mod_base = OTHER; note = uracil
  modified_base 43: mod_base = OTHER; note = uracil
  modified_base 46..47: mod_base = OTHER; note = uracil
  modified_base 49: mod_base = OTHER; note = uracil
  modified_base 57: mod_base = OTHER; note = uracil
  modified_base 61: mod_base = OTHER; note = uracil
  modified_base 66: mod_base = OTHER; note = uracil
  modified_base 69: mod_base = OTHER; note = uracil
  modified_base 72..73: mod_base = OTHER; note = uracil
  modified_base 78..79: mod_base = OTHER; note = uracil
  modified_base 81..82: mod_base = OTHER; note = uracil
  modified_base 90: mod_base = OTHER; note = uracil
  modified_base 99: mod_base = OTHER; note = uracil
  modified_base 105..106: mod_base = OTHER; note = uracil
  modified_base 109: mod_base = OTHER; note = uracil
  modified_base 112..113: mod_base = OTHER; note = uracil
  modified_base 117..118: mod_base = OTHER; note = uracil
  modified_base 122: mod_base = OTHER; note = uracil
  modified_base 159: mod_base = OTHER; note = uracil
  modified_base 161..162: mod_base = OTHER; note = uracil
  modified_base 170..171: mod_base = OTHER; note = uracil
  modified_base 175: mod_base = OTHER; note = uracil
  modified_base 180: mod_base = OTHER; note = uracil
  modified_base 183: mod_base = OTHER; note = uracil
  modified_base 186: mod_base = OTHER; note = uracil
  modified_base 188..189: mod_base = OTHER; note = uracil
  modified_base 194: mod_base = OTHER; note = uracil
  modified_base 196: mod_base = OTHER; note = uracil
  modified_base 204: mod_base = OTHER; note = uracil
  modified_base 207..208: mod_base = OTHER; note = uracil
  modified_base 211..212: mod_base = OTHER; note = uracil
  modified_base 217..218: mod_base = OTHER; note = uracil
  modified_base 220..222: mod_base = OTHER; note = uracil
  modified_base 229: mod_base = OTHER; note = uracil
  modified_base 239: mod_base = OTHER; note = uracil
  modified_base 249: mod_base = OTHER; note = uracil
  modified_base 254: mod_base = OTHER; note = uracil
  modified_base 258: mod_base = OTHER; note = uracil
  modified_base 296: mod_base = OTHER; note = uracil
  modified_base 298: mod_base = OTHER; note = uracil
  modified_base 19: mod_base = m5c
  modified_base 21: mod_base = m5c
  modified_base 27: mod_base = m5c
  modified_base 51: mod_base = m5c
  modified_base 110: mod_base = m5c
  modified_base 119: mod_base = m5c
  modified_base 176: mod_base = m5c
  modified_base 209: mod_base = m5c
  modified_base 214: mod_base = m5c
  variation 151: note = CpG site, residue is C if methylated or T(=U) if unmethylated
taggttggagtgtaatggcgcgatttcggtttattgtaatttttgtttttcgggtttaagtaatttttttattttagttttttgagtagttgggattataggtatttgtcgttatgttcggttaattttttaatttgtttttagtagagayggggttttattatgttggttaggtcggtttataatttttgattttaggtgatttattcgtttcggttttttaaattataggtgttattattaggatttttggtagataggagtgttgtaggggatggaagtggatagtaggaggttttg

SEQ ID NO: 370 - DNA, 300 bp, synthetic construct
  source 1..300: mol_type = other DNA
  modified_base 1: mod_base = OTHER; note = uracil
  modified_base 6..7: mod_base = OTHER; note = uracil
  modified_base 9..10: mod_base = OTHER; note = uracil
  modified_base 13: mod_base = OTHER; note = uracil
  modified_base 17..18: mod_base = OTHER; note = uracil
  modified_base 20: mod_base = OTHER; note = uracil
  modified_base 23..24: mod_base = OTHER; note = uracil
  modified_base 27..30: mod_base = OTHER; note = uracil
  modified_base 33: mod_base = OTHER; note = uracil
  modified_base 36: mod_base = OTHER; note = uracil
  modified_base 38: mod_base = OTHER; note = uracil
  modified_base 40..41: mod_base = OTHER; note = uracil
  modified_base 45: mod_base = OTHER; note = uracil
  modified_base 48..49: mod_base = OTHER; note = uracil
  modified_base 56..57: mod_base = OTHER; note = uracil
  modified_base 67: mod_base = OTHER; note = uracil
  modified_base 69..70: mod_base = OTHER; note = uracil
  modified_base 85: mod_base = OTHER; note = uracil
  modified_base 100: mod_base = OTHER; note = uracil
  modified_base 102..103: mod_base = OTHER; note = uracil
  modified_base 110: mod_base = OTHER; note = uracil
  modified_base 123: mod_base = OTHER; note = uracil
  modified_base 127..128: mod_base = OTHER; note = uracil
  modified_base 132..133: mod_base = OTHER; note = uracil
  modified_base 136: mod_base = OTHER; note = uracil
  modified_base 146..148: mod_base = OTHER; note = uracil
  modified_base 152: mod_base = OTHER; note = uracil
  modified_base 154: mod_base = OTHER; note = uracil
  modified_base 157: mod_base = OTHER; note = uracil
  modified_base 164: mod_base = OTHER; note = uracil
  modified_base 180: mod_base = OTHER; note = uracil
  modified_base 185: mod_base = OTHER; note = uracil
  modified_base 193: mod_base = OTHER; note = uracil
  modified_base 199..200: mod_base = OTHER; note = uracil
  modified_base 207..209: mod_base = OTHER; note = uracil
  modified_base 212: mod_base = OTHER; note = uracil
  modified_base 215: mod_base = OTHER; note = uracil
  modified_base 217: mod_base = OTHER; note = uracil
  modified_base 224: mod_base = OTHER; note = uracil
  modified_base 241: mod_base = OTHER; note = uracil
  modified_base 247..248: mod_base = OTHER; note = uracil
  modified_base 256: mod_base = OTHER; note = uracil
  modified_base 265: mod_base = OTHER; note = uracil
  modified_base 272: mod_base = OTHER; note = uracil
  modified_base 283..284: mod_base = OTHER; note = uracil
  modified_base 289: mod_base = OTHER; note = uracil
  modified_base 291: mod_base = OTHER; note = uracil
  modified_base 293..294: mod_base = OTHER; note = uracil
  modified_base 297..298: mod_base = OTHER; note = uracil
  modified_base 86: mod_base = m5c
  modified_base 91: mod_base = m5c
  modified_base 124: mod_base = m5c
  modified_base 181: mod_base = m5c
  modified_base 190: mod_base = m5c
  modified_base 249: mod_base = m5c
  modified_base 273: mod_base = m5c
  modified_base 279: mod_base = m5c
  modified_base 281: mod_base = m5c
  variation 149: note = CpG site, residue is C if methylated or T(=U) if unmethylated
tagagttttttattatttatttttattttttataatatttttgtttgttaagaattttaatgataatatttgtaatttgggaggtcgaggcgggtagattatttgagattaggagttgtagatcggtttggttaatatggtgaaatttygtttttattaaaaataaattaaaaaattagtcgggtatggcggtaggtatttgtaattttagttatttaggaggttaaggtagaagaattgtttgaattcgagaggtagaagttgtagtgagtcgagatcgcgttattgtattttagtttg

SEQ ID NO: 371 - DNA, 300 bp, synthetic construct
  source 1..300: mol_type = other DNA
  modified_base 8..9: mod_base = OTHER; note = uracil
  modified_base 14: mod_base = OTHER; note = uracil
  modified_base 17: mod_base = OTHER; note = uracil
  modified_base 22: mod_base = OTHER; note = uracil
  modified_base 24..25: mod_base = OTHER; note = uracil
  modified_base 27..28: mod_base = OTHER; note = uracil
  modified_base 33: mod_base = OTHER; note = uracil
  modified_base 37: mod_base = OTHER; note = uracil
  modified_base 43: mod_base = OTHER; note = uracil
  modified_base 48: mod_base = OTHER; note = uracil
  modified_base 52: mod_base = OTHER; note = uracil
  modified_base 58: mod_base = OTHER; note = uracil
  modified_base 60: mod_base = OTHER; note = uracil
  modified_base 62: mod_base = OTHER; note = uracil
  modified_base 75: mod_base = OTHER; note = uracil
  modified_base 77: mod_base = OTHER; note = uracil
  modified_base 84: mod_base = OTHER; note = uracil
  modified_base 88..91: mod_base = OTHER; note = uracil
  modified_base 93: mod_base = OTHER; note = uracil
  modified_base 96: mod_base = OTHER; note = uracil
  modified_base 102..105: mod_base = OTHER; note = uracil
  modified_base 107..108: mod_base = OTHER; note = uracil
  modified_base 112..113: mod_base = OTHER; note = uracil
  modified_base 117: mod_base = OTHER; note = uracil
  modified_base 119: mod_base = OTHER; note = uracil
  modified_base 121..122: mod_base = OTHER; note = uracil
  modified_base 127: mod_base = OTHER; note = uracil
  modified_base 129..130: mod_base = OTHER; note = uracil
  modified_base 132..134: mod_base = OTHER; note = uracil
  modified_base 137: mod_base = OTHER; note = uracil
  modified_base 139: mod_base = OTHER; note = uracil
  modified_base 141: mod_base = OTHER; note = uracil
  modified_base 143: mod_base = OTHER; note = uracil
  modified_base 147..148: mod_base = OTHER; note = uracil
  modified_base 155..156: mod_base = OTHER; note = uracil
  modified_base 159: mod_base = OTHER; note = uracil
  modified_base 162: mod_base = OTHER; note = uracil
  modified_base 164..165: mod_base = OTHER; note = uracil
  modified_base 167: mod_base = OTHER; note = uracil
  modified_base 172..173: mod_base = OTHER; note = uracil
  modified_base 175..177: mod_base = OTHER; note = uracil
  modified_base 179: mod_base = OTHER; note = uracil
  modified_base 181: mod_base = OTHER; note = uracil
  modified_base 187..188: mod_base = OTHER; note = uracil
  modified_base 192..194: mod_base = OTHER; note = uracil
  modified_base 201..202: mod_base = OTHER; note = uracil
  modified_base 209: mod_base = OTHER; note = uracil
  modified_base 212..214: mod_base = OTHER; note = uracil
  modified_base 216: mod_base = OTHER; note = uracil
  modified_base 219: mod_base = OTHER; note = uracil
  modified_base 224..225: mod_base = OTHER; note = uracil
  modified_base 227..228: mod_base = OTHER; note = uracil
  modified_base 230..231: mod_base = OTHER; note = uracil
  modified_base 233: mod_base = OTHER; note = uracil
  modified_base 237..238: mod_base = OTHER; note = uracil
  modified_base 244..246: mod_base = OTHER; note = uracil
  modified_base 249: mod_base = OTHER; note = uracil
  modified_base 255: mod_base = OTHER; note = uracil
  modified_base 258: mod_base = OTHER; note = uracil
  modified_base 264: mod_base = OTHER; note = uracil
  modified_base 269: mod_base = OTHER; note = uracil
  modified_base 272..273: mod_base = OTHER; note = uracil
  modified_base 275..278: mod_base = OTHER; note = uracil
  modified_base 286..287: mod_base = OTHER; note = uracil
  modified_base 31: mod_base = m5c
  modified_base 85: mod_base = m5c
  modified_base 189: mod_base = m5c
  modified_base 196: mod_base = m5c
  modified_base 234: mod_base = m5c
  modified_base 265: mod_base = m5c
  modified_base 280: mod_base = m5c
  variation 150: note = CpG site, residue is C if methylated or T(=U) if unmethylated
tgaatgatttgggtagtatttttttatttgcgtttgtatttgttagatagtttgtgattttttgtgggagaaaatataagaaatcggtttttttgttggttttttatttggtttggtttttttgttttttattttgtatatttatgtttyggaatttgttttttttttgagttttttttatagtggttcggtttacgtggtttttaatttgtttatattagagtttttattttcggtttatggtttattagaggtagttggagtcgggtattttttttacgtgggtttttgaggatggga

SEQ ID NO: 372 - DNA, 300 bp, synthetic construct
  source 1..300: mol_type = other DNA
  modified_base 2..4: mod_base = OTHER; note = uracil
  modified_base 7..8: mod_base = OTHER; note = uracil
  modified_base 10: mod_base = OTHER; note = uracil
  modified_base 16..18: mod_base = OTHER; note = uracil
  modified_base 33..34: mod_base = OTHER; note = uracil
  modified_base 38: mod_base = OTHER; note = uracil
  modified_base 40..41: mod_base = OTHER; note = uracil
  modified_base 44: mod_base = OTHER; note = uracil
  modified_base 47..48: mod_base = OTHER; note = uracil
  modified_base 50: mod_base = OTHER; note = uracil
  modified_base 58..59: mod_base = OTHER; note = uracil
  modified_base 65: mod_base = OTHER; note = uracil
  modified_base 78: mod_base = OTHER; note = uracil
  modified_base 80: mod_base = OTHER; note = uracil
  modified_base 90: mod_base = OTHER; note = uracil
  modified_base 101..102: mod_base = OTHER; note = uracil
  modified_base 110: mod_base = OTHER; note = uracil
  modified_base 115..116: mod_base = OTHER; note = uracil
  modified_base 118: mod_base = OTHER; note = uracil
  modified_base 130: mod_base = OTHER; note = uracil
  modified_base 132: mod_base = OTHER; note = uracil
  modified_base 143: mod_base = OTHER; note = uracil
  modified_base 149: mod_base = OTHER; note = uracil
  modified_base 155: mod_base = OTHER; note = uracil
  modified_base 165: mod_base = OTHER; note = uracil
  modified_base 177: mod_base = OTHER; note = uracil
  modified_base 185..186: mod_base = OTHER; note = uracil
  modified_base 190..191: mod_base = OTHER; note = uracil
  modified_base 202..203: mod_base = OTHER; note = uracil
  modified_base 206: mod_base = OTHER; note = uracil
  modified_base 214: mod_base = OTHER; note = uracil
  modified_base 221: mod_base = OTHER; note = uracil
  modified_base 231: mod_base = OTHER; note = uracil
  modified_base 233..235: mod_base = OTHER; note = uracil
  modified_base 237: mod_base = OTHER; note = uracil
  modified_base 245: mod_base = OTHER; note = uracil
  modified_base 247: mod_base = OTHER; note = uracil
  modified_base 251: mod_base = OTHER; note = uracil
  modified_base 255: mod_base = OTHER; note = uracil
  modified_base 259: mod_base = OTHER; note = uracil
  modified_base 265: mod_base = OTHER; note = uracil
  modified_base 271: mod_base = OTHER; note = uracil
  modified_base 285: mod_base = OTHER; note = uracil
  modified_base 288..290: mod_base = OTHER; note = uracil
  modified_base 295: mod_base = OTHER; note = uracil
  modified_base 299: mod_base = OTHER; note = uracil
  modified_base 20: mod_base = m5c
  modified_base 35: mod_base = m5c
  modified_base 66: mod_base = m5c
  modified_base 104: mod_base = m5c
  modified_base 111: mod_base = m5c
  modified_base 215: mod_base = m5c
  modified_base 269: mod_base = m5c
  variation 150: note = CpG site, residue is C if methylated or T(=U) if unmethylated
ttttatttttaaaggtttacgtggggaggatgttcggttttagttgtttttgatgggttataggtcggaggtggaggttttgatgtgggtagattaaaggttacgtgggtcgggttattgtgagggaggtttagaggagaagtaggtttygaggtatgagtgtgtagggtggagaataggagagttaggttaggtggggaattagtagaggggtcggttttttgtgtttttttttatagagagttatagattgtttagtaaatgtaagcgtaggtggagaaatgttgtttaggttattta

SEQ ID NO: 373 - DNA, 300 bp, synthetic construct
  source 1..300: mol_type = other DNA
  modified_base 9..10: mod_base = OTHER; note = uracil
  modified_base 19: mod_base = OTHER; note = uracil
  modified_base 32: mod_base = OTHER; note = uracil
  modified_base 41: mod_base = OTHER; note = uracil
  modified_base 59..60: mod_base = OTHER; note = uracil
  modified_base 63: mod_base = OTHER; note = uracil
  modified_base 80: mod_base = OTHER; note = uracil
  modified_base 87..89: mod_base = OTHER; note = uracil
  modified_base 103: mod_base = OTHER; note = uracil
  modified_base 114..115: mod_base = OTHER; note = uracil
  modified_base 126: mod_base = OTHER; note = uracil
  modified_base 130: mod_base = OTHER; note = uracil
  modified_base 135: mod_base = OTHER; note = uracil
  modified_base 140: mod_base = OTHER; note = uracil
  modified_base 142: mod_base = OTHER; note = uracil
  modified_base 152..153: mod_base = OTHER; note = uracil
  modified_base 156: mod_base = OTHER; note = uracil
  modified_base 159..160: mod_base = OTHER; note = uracil
  modified_base 162: mod_base = OTHER; note = uracil
  modified_base 168: mod_base = OTHER; note = uracil
  modified_base 172: mod_base = OTHER; note = uracil
  modified_base 176: mod_base = OTHER; note = uracil
  modified_base 179: mod_base = OTHER; note = uracil
  modified_base 184: mod_base = OTHER; note = uracil
  modified_base 187: mod_base = OTHER; note = uracil
  modified_base 191: mod_base = OTHER; note = uracil
  modified_base 198: mod_base = OTHER; note = uracil
  modified_base 205: mod_base = OTHER; note = uracil
  modified_base 207: mod_base = OTHER; note = uracil
  modified_base 210: mod_base = OTHER; note = uracil
  modified_base 217..219: mod_base = OTHER; note = uracil
  modified_base 227: mod_base = OTHER; note = uracil
  modified_base 229..230: mod_base = OTHER; note = uracil
  modified_base 236: mod_base = OTHER; note = uracil
  modified_base 238..239: mod_base = OTHER; note = uracil
  modified_base 242: mod_base = OTHER; note = uracil
  modified_base 246..248: mod_base = OTHER; note = uracil
  modified_base 250: mod_base = OTHER; note = uracil
  modified_base 253..255: mod_base = OTHER; note = uracil
  modified_base 262: mod_base = OTHER; note = uracil
  modified_base 266..269: mod_base = OTHER; note = uracil
  modified_base 271: mod_base = OTHER; note = uracil
  modified_base 278: mod_base = OTHER; note = uracil
  modified_base 281..282: mod_base = OTHER; note = uracil
  modified_base 285..286: mod_base = OTHER; note = uracil
  modified_base 295: mod_base = OTHER; note = uracil
  modified_base 298..299: mod_base = OTHER; note = uracil
  modified_base 4: mod_base = m5c
  modified_base 15: mod_base = m5c
  modified_base 22: mod_base = m5c
  modified_base 25: mod_base = m5c
  modified_base 27: mod_base = m5c
  modified_base 33: mod_base = m5c
  modified_base 44: mod_base = m5c
  modified_base 52: mod_base = m5c
  modified_base 66: mod_base = m5c
  modified_base 72: mod_base = m5c
  modified_base 75: mod_base = m5c
  modified_base 78: mod_base = m5c
  modified_base 81: mod_base = m5c
  modified_base 90: mod_base = m5c
  modified_base 96: mod_base = m5c
  modified_base 98: mod_base = m5c
  modified_base 108: mod_base = m5c
  modified_base 116: mod_base = m5c
  modified_base 118: mod_base = m5c
  modified_base 124: mod_base = m5c
  modified_base 133: mod_base = m5c
  modified_base 143: mod_base = m5c
  modified_base 165: mod_base = m5c
  modified_base 180: mod_base = m5c
  modified_base 189: mod_base = m5c
  modified_base 192: mod_base = m5c
  modified_base 201: mod_base = m5c
  modified_base 221: mod_base = m5c
  modified_base 223: mod_base = m5c
  modified_base 231: mod_base = m5c
  modified_base 233: mod_base = m5c
  modified_base 240: mod_base = m5c
  modified_base 243: mod_base = m5c
  modified_base 258: mod_base = m5c
  modified_base 260: mod_base = m5c
  modified_base 263: mod_base = m5c
  modified_base 272: mod_base = m5c
  modified_base 283: mod_base = m5c
  modified_base 287: mod_base = m5c
  modified_base 291: mod_base = m5c
  modified_base 296: mod_base = m5c
  variation 150: note = CpG site, residue is C if methylated or T(=U) if unmethylated
  variation 170: note = CpG site, residue is C if methylated or T(=U) if unmethylated
gggcggggtttgtgcggtttgcggcgcggagtcgagtgggttgcggggatgcgggggattagttgcgtgggcggcggcgtcgagagtttcggaggcgcggggttgagcgagggttcgcgggggcgttggttgcgtttggtttcggtatgygtttattttttttgcgtttygttagttgtcgtgttgttcgtcgtgtattacggttttatttgggtatttacgcggtttttcgcggtattcgtcggtttatagtttagcgcgtcgtttttttcgtgtgttgttcgttcgggcgtgtcgttt

SEQ ID NO: 374 - DNA, 300 bp, synthetic construct
  source 1..300: mol_type = other DNA
  modified_base 7: mod_base = OTHER; note = uracil
  modified_base 11..12: mod_base = OTHER; note = uracil
  modified_base 21: mod_base = OTHER; note = uracil
  modified_base 24: mod_base = OTHER; note = uracil
  modified_base 26: mod_base = OTHER; note = uracil
  modified_base 44: mod_base = OTHER; note = uracil
  modified_base 49: mod_base = OTHER; note = uracil
  modified_base 56: mod_base = OTHER; note = uracil
  modified_base 66: mod_base = OTHER; note = uracil
  modified_base 76: mod_base = OTHER; note = uracil
  modified_base 87..89: mod_base = OTHER; note = uracil
  modified_base 98: mod_base = OTHER; note = uracil
  modified_base 106: mod_base = OTHER; note = uracil
  modified_base 115: mod_base = OTHER; note = uracil
  modified_base 118: mod_base = OTHER; note = uracil
  modified_base 123: mod_base = OTHER; note = uracil
  modified_base 126: mod_base = OTHER; note = uracil
  modified_base 137: mod_base = OTHER; note = uracil
  modified_base 152: mod_base = OTHER; note = uracil
  modified_base 156: mod_base = OTHER; note = uracil
  modified_base 162..163: mod_base = OTHER; note = uracil
  modified_base 169: mod_base = OTHER; note = uracil
  modified_base 172..173: mod_base = OTHER; note = uracil
  modified_base 178..181: mod_base = OTHER; note = uracil
  modified_base 188..190: mod_base = OTHER; note = uracil
  modified_base 194: mod_base = OTHER; note = uracil
  modified_base 196: mod_base = OTHER; note = uracil
  modified_base 199..201: mod_base = OTHER; note = uracil
  modified_base 206..207: mod_base = OTHER; note = uracil
  modified_base 209: mod_base = OTHER; note = uracil
  modified_base 215: mod_base = OTHER; note = uracil
  modified_base 217: mod_base = OTHER; note = uracil
  modified_base 224: mod_base = OTHER; note = uracil
  modified_base 227: mod_base = OTHER; note = uracil
  modified_base 230..232: mod_base = OTHER; note = uracil
  modified_base 236: mod_base = OTHER; note = uracil
  modified_base 239: mod_base = OTHER; note = uracil
  modified_base 244..247: mod_base = OTHER; note = uracil
  modified_base 250: mod_base = OTHER; note = uracil
  modified_base 253..255: mod_base = OTHER; note = uracil
  modified_base 258: mod_base = OTHER; note = uracil
  modified_base 261..263: mod_base = OTHER; note = uracil
  modified_base 265: mod_base = OTHER; note = uracil
  modified_base 270: mod_base = OTHER; note = uracil
  modified_base 272: mod_base = OTHER; note = uracil
  modified_base 277: mod_base = OTHER; note = uracil
  modified_base 280: mod_base = OTHER; note = uracil
  modified_base 284: mod_base = OTHER; note = uracil
  modified_base 287: mod_base = OTHER; note = uracil
  modified_base 289: mod_base = OTHER; note = uracil
  modified_base 293..295: mod_base = OTHER; note = uracil
  modified_base 298..300: mod_base = OTHER; note = uracil
  modified_base 4: mod_base = m5c
  modified_base 9: mod_base = m5c
  modified_base 13: mod_base = m5c
  modified_base 17: mod_base = m5c
  modified_base 28: mod_base = m5c
  modified_base 37: mod_base = m5c
  modified_base 40: mod_base = m5c
  modified_base 42: mod_base = m5c
  modified_base 57: mod_base = m5c
  modified_base 60: mod_base = m5c
  modified_base 67: mod_base = m5c
  modified_base 69: mod_base = m5c
  modified_base 77: mod_base = m5c
  modified_base 79: mod_base = m5c
  modified_base 99: mod_base = m5c
  modified_base 108: mod_base = m5c
  modified_base 111: mod_base = m5c
  modified_base 120: mod_base = m5c
  modified_base 135: mod_base = m5c
  modified_base 157: mod_base = m5c
  modified_base 167: mod_base = m5c
  modified_base 176: mod_base = m5c
  modified_base 182: mod_base = m5c
  modified_base 184: mod_base = m5c
  modified_base 192: mod_base = m5c
  modified_base 202: mod_base = m5c
  modified_base 204: mod_base = m5c
  modified_base 210: mod_base = m5c
  modified_base 219: mod_base = m5c
  modified_base 222: mod_base = m5c
  modified_base 225: mod_base = m5c
  modified_base 228: mod_base = m5c
  modified_base 234: mod_base = m5c
  modified_base 248: mod_base = m5c
  modified_base 256: mod_base = m5c
  modified_base 267: mod_base = m5c
  modified_base 273: mod_base = m5c
  modified_base 275: mod_base = m5c
  modified_base 278: mod_base = m5c
  modified_base 285: mod_base = m5c
  modified_base 296: mod_base = m5c
  variation 130: note = CpG site, residue is C if methylated or T(=U) if unmethylated
  variation 150: note = CpG site, residue is C if methylated or T(=U) if unmethylated
aggcggtacgttcgggcgggtagtatacggaggggacggcgcgttgggttgtgggtcggcgggtgtcgcgggagatcgcgtgggtatttagatgagatcgtagtatacggcgagtagtacggtagttagygagacgtagaggaagtaggygtatatcggagttaagcgtagttagcgttttcgcgggttttcgtttagtttcgcgttttcggggttttcggcgtcgtcgtttacgtagttggtttttcgtattttcgtagtttattcggtttcgcgtcgtagatcgtataggtttcgttt

SEQ ID NO: 375 - DNA, 300 bp, synthetic construct
  source 1..300: mol_type = other DNA
  modified_base 12: mod_base = OTHER; note = uracil
  modified_base 26..28: mod_base = OTHER; note = uracil
  modified_base 35: mod_base = OTHER; note = uracil
  modified_base 37: mod_base = OTHER; note = uracil
  modified_base 41..43: mod_base = OTHER; note = uracil
  modified_base 49: mod_base = OTHER; note = uracil
  modified_base 67: mod_base = OTHER; note = uracil
  modified_base 76: mod_base = OTHER; note = uracil
  modified_base 80: mod_base = OTHER; note = uracil
  modified_base 84: mod_base = OTHER; note = uracil
  modified_base 88: mod_base = OTHER; note = uracil
  modified_base 95: mod_base = OTHER; note = uracil
  modified_base 98..99: mod_base = OTHER; note = uracil
  modified_base 104: mod_base = OTHER; note = uracil
  modified_base 107: mod_base = OTHER; note = uracil
  modified_base 109: mod_base = OTHER; note = uracil
  modified_base 117: mod_base = OTHER; note = uracil
  modified_base 121: mod_base = OTHER; note = uracil
  modified_base 124: mod_base = OTHER; note = uracil
  modified_base 129..130: mod_base = OTHER; note = uracil
  modified_base 133..135: mod_base = OTHER; note = uracil
  modified_base 137..138: mod_base = OTHER; note = uracil
  modified_base 141..142: mod_base = OTHER; note = uracil
  modified_base 148: mod_base = OTHER; note = uracil
  modified_base 151: mod_base = OTHER; note = uracil
  modified_base 157..158: mod_base = OTHER; note = uracil
  modified_base 161: mod_base = OTHER; note = uracil
  modified_base 168: mod_base = OTHER; note = uracil
  modified_base 178: mod_base = OTHER; note = uracil
  modified_base 183: mod_base = OTHER; note = uracil
  modified_base 188..192: mod_base = OTHER; note = uracil
  modified_base 211: mod_base = OTHER; note = uracil
  modified_base 216: mod_base = OTHER; note = uracil
  modified_base 222..223: mod_base = OTHER; note = uracil
  modified_base 227: mod_base = OTHER; note = uracil
  modified_base 234..235: mod_base = OTHER; note = uracil
  modified_base 238..239: mod_base = OTHER; note = uracil
  modified_base 243: mod_base = OTHER; note = uracil
  modified_base 251: mod_base = OTHER; note = uracil
  modified_base 259: mod_base = OTHER; note = uracil
  modified_base 266: mod_base = OTHER; note = uracil
  modified_base 275: mod_base = OTHER; note = uracil
  modified_base 283: mod_base = OTHER; note = uracil
  modified_base 286: mod_base = OTHER; note = uracil
  modified_base 288..289: mod_base = OTHER; note = uracil
  modified_base 297: mod_base = OTHER; note = uracil
  modified_base 299: mod_base = OTHER; note = uracil
  modified_base 105: mod_base = m5c
  modified_base 118: mod_base = m5c
  modified_base 154: mod_base = m5c
  modified_base 193: mod_base = m5c
  modified_base 201: mod_base = m5c
  modified_base 209: mod_base = m5c
  modified_base 213: mod_base = m5c
  modified_base 225: mod_base = m5c
  modified_base 245: mod_base = m5c
  modified_base 252: mod_base = m5c
  variation 149: note = CpG site, residue is C if methylated or T(=U) if unmethylated
aagtgtatttttaaggtatgaggggtttagaggatattgttttaaaagtagtggttgtgagagtggttttggagttaggttgatagtttggaaatttttaggttcgttttgaagtgtcggttgtatgattagttttttagtttgtgttygtttcggttttttttgtgtaagtgagagtattgttgattttttcggggtggcgagggggcgtacgttagtgatttcgtatggtgtttgttaggtacgtggttcgtgttttatgattttttgagagttttggagtagttttaagaagatttt

SEQ ID NO: 376 - DNA, 300 bp, synthetic construct
  source 1..300: mol_type = other DNA
  modified_base 5: mod_base = OTHER; note = uracil
  modified_base 8: mod_base = OTHER; note = uracil
  modified_base 15: mod_base = OTHER; note = uracil
  modified_base 18: mod_base = OTHER; note = uracil
  modified_base 20..21: mod_base = OTHER; note = uracil
  modified_base 26: mod_base = OTHER; note = uracil
  modified_base 28: mod_base = OTHER; note = uracil
  modified_base 30: mod_base = OTHER; note = uracil
  modified_base 38: mod_base = OTHER; note = uracil
  modified_base 45: mod_base = OTHER; note = uracil
  modified_base 51..52: mod_base = OTHER; note = uracil
  modified_base 58..59: mod_base = OTHER; note = uracil
  modified_base 63: mod_base = OTHER; note = uracil
  modified_base 67: mod_base = OTHER; note = uracil
  modified_base 69..70: mod_base = OTHER; note = uracil
  modified_base 80: mod_base = OTHER; note = uracil
  modified_base 82: mod_base = OTHER; note = uracil
  modified_base 92..96: mod_base = OTHER; note = uracil
  modified_base 100..101: mod_base = OTHER; note = uracil
  modified_base 103..105: mod_base = OTHER; note = uracil
  modified_base 115: mod_base = OTHER; note = uracil
  modified_base 118: mod_base = OTHER; note = uracil
  modified_base 123: mod_base = OTHER; note = uracil
  modified_base 125: mod_base = OTHER; note = uracil
  modified_base 127: mod_base = OTHER; note = uracil
  modified_base 129: mod_base = OTHER; note = uracil
  modified_base 133: mod_base = OTHER; note = uracil
  modified_base 135: mod_base = OTHER; note = uracil
  modified_base 144: mod_base = OTHER; note = uracil
  modified_base 154: mod_base = OTHER; note = uracil
  modified_base 156: mod_base = OTHER; note = uracil
  modified_base 160: mod_base = OTHER; note = uracil
  modified_base 168: mod_base = OTHER; note = uracil
  modified_base 173: mod_base = OTHER; note = uracil
  modified_base 177: mod_base = OTHER; note = uracil
  modified_base 180: mod_base = OTHER; note = uracil
  modified_base 184: mod_base = OTHER; note = uracil
  modified_base 186: mod_base = OTHER; note = uracil
  modified_base 189: mod_base = OTHER; note = uracil
  modified_base 198..199: mod_base = OTHER; note = uracil
  modified_base 209..210: mod_base = OTHER; note = uracil
  modified_base 214: mod_base = OTHER; note = uracil
  modified_base 218: mod_base = OTHER; note = uracil
  modified_base 221..222: mod_base = OTHER; note = uracil
  modified_base 226: mod_base = OTHER; note = uracil
  modified_base 228..229: mod_base = OTHER; note = uracil
  modified_base 234..235: mod_base = OTHER; note = uracil
  modified_base 237: mod_base = OTHER; note = uracil
  modified_base 239: mod_base = OTHER; note = uracil
  modified_base 241: mod_base = OTHER; note = uracil
  modified_base 243: mod_base = OTHER; note = uracil
  modified_base 246..247: mod_base = OTHER; note = uracil
  modified_base 249: mod_base = OTHER; note = uracil
  modified_base 252: mod_base = OTHER; note = uracil
  modified_base 261: mod_base = OTHER; note = uracil
  modified_base 267..268: mod_base = OTHER; note = uracil
  modified_base 270: mod_base = OTHER; note = uracil
  modified_base 275..278: mod_base = OTHER; note = uracil
  modified_base 280: mod_base = OTHER; note = uracil
  modified_base 284..285: mod_base = OTHER; note = uracil
  modified_base 295: mod_base = OTHER; note = uracil
  modified_base 297: mod_base = OTHER; note = uracil
  modified_base 47: mod_base = m5c
  modified_base 54: mod_base = m5c
  modified_base 74: mod_base = m5c
  modified_base 86: mod_base = m5c
  modified_base 90: mod_base = m5c
  modified_base 98: mod_base = m5c
  modified_base 106: mod_base = m5c
  modified_base 145: mod_base = m5c
  modified_base 181: mod_base = m5c
  modified_base 194: mod_base = m5c
  variation 150: note = CpG site, residue is C if methylated or T(=U) if unmethylated
gagtttttttggagttgttttaaagtttttaaagaattatgaaatacggattacgtgtttggtaggtattatgcgaggttattgacgtgcgttttttcgttatttcggggggattagtaatgtttttatttgtataaagaaggtcgaagyggatataggttggagggttggttatgtagtcggtattttagagcggatttggaagtttttagattgttagtttgattttaaagttatttttataattattgtttttgggatagtgttttttgggttttttatattttgaaaatatatttt

SEQ ID NO: 377 - DNA, 300 bp, synthetic construct
  source 1..300: mol_type = other DNA
  modified_base 11: mod_base = OTHER; note = uracil
  modified_base 16: mod_base = OTHER; note = uracil
  modified_base 18: mod_base = OTHER; note = uracil
  modified_base 20..21: mod_base = OTHER; note = uracil
  modified_base 27: mod_base = OTHER; note = uracil
  modified_base 30: mod_base = OTHER; note = uracil
  modified_base 53..54: mod_base = OTHER; note = uracil
  modified_base 67: mod_base = OTHER; note = uracil
  modified_base 70: mod_base = OTHER; note = uracil
  modified_base 72: mod_base = OTHER; note = uracil
  modified_base 77: mod_base = OTHER; note = uracil
  modified_base 80: mod_base = OTHER; note = uracil
  modified_base 84: mod_base = OTHER; note = uracil
  modified_base 93: mod_base = OTHER; note = uracil
  modified_base 96: mod_base = OTHER; note = uracil
  modified_base 106: mod_base = OTHER; note = uracil
  modified_base 114: mod_base = OTHER; note = uracil
  modified_base 121: mod_base = OTHER; note = uracil
  modified_base 128..129: mod_base = OTHER; note = uracil
  modified_base 131..132: mod_base = OTHER; note = uracil
  modified_base 137: mod_base = OTHER; note = uracil
  modified_base 143: mod_base = OTHER; note = uracil
  modified_base 162: mod_base = OTHER; note = uracil
  modified_base 165: mod_base = OTHER; note = uracil
  modified_base 169: mod_base = OTHER; note = uracil
  modified_base 172: mod_base = OTHER; note = uracil
  modified_base 177: mod_base = OTHER; note = uracil
  modified_base 179..180: mod_base = OTHER; note = uracil
  modified_base 186..187: mod_base = OTHER; note = uracil
  modified_base 189: mod_base = OTHER; note = uracil
  modified_base 196..198: mod_base = OTHER; note = uracil
  modified_base 202: mod_base = OTHER; note = uracil
  modified_base 205: mod_base = OTHER; note = uracil
  modified_base 208..210: mod_base = OTHER; note = uracil
  modified_base 220..221: mod_base = OTHER; note = uracil
  modified_base 223: mod_base = OTHER; note = uracil
  modified_base 225: mod_base = OTHER; note = uracil
  modified_base 233: mod_base = OTHER; note = uracil
  modified_base 245: mod_base = OTHER; note = uracil
  modified_base 250..251: mod_base = OTHER; note = uracil
  modified_base 253..254: mod_base = OTHER; note = uracil
  modified_base 257: mod_base = OTHER; note = uracil
  modified_base 262..263: mod_base = OTHER; note = uracil
  modified_base 265: mod_base = OTHER; note = uracil
  modified_base 271..272: mod_base = OTHER; note = uracil
  modified_base 278..279: mod_base = OTHER; note = uracil
  modified_base 287..288: mod_base = OTHER; note = uracil
  modified_base 292: mod_base = OTHER; note = uracil
  modified_base 297..299: mod_base = OTHER; note = uracil
  modified_base 107: mod_base = m5c
  modified_base 138: mod_base = m5c
  modified_base 199: mod_base = m5c
  modified_base 211: mod_base = m5c
  modified_base 216: mod_base = m5c
  variation 151: note = CpG site, residue is C if methylated or T(=U) if unmethylated
taattttaaataaaattttttatgagtaattaaatatttaaaatgtgtttttttataaaagtgaattagtttagttttgtaggttgaaaatataataaggaggattcgggttgtagaaagtagagggttatttagatcgtgtttgagagayggggagaaagtagttgtttgttgtgtattagaggtttttagggatttcggtagtaatttcgtggcgggttatatttgggagttgatttgtttttagaattattagttaagttatatgagttaggagtttggttatttatttaaagttta

SEQ ID NO: 378 - DNA, 300 bp, synthetic construct
  source 1..300: mol_type = other DNA
  modified_base 5: mod_base = OTHER; note = uracil
  modified_base 19..20: mod_base = OTHER; note = uracil
  modified_base 24: mod_base = OTHER; note = uracil
  modified_base 26..27: mod_base = OTHER; note = uracil
  modified_base 31: mod_base = OTHER; note = uracil
  modified_base 33: mod_base = OTHER; note = uracil
  modified_base 40: mod_base = OTHER; note = uracil
  modified_base 45: mod_base = OTHER; note = uracil
  modified_base 54: mod_base = OTHER; note = uracil
  modified_base 61: mod_base = OTHER; note = uracil
  modified_base 66: mod_base = OTHER; note = uracil
  modified_base 69: mod_base = OTHER; note = uracil
  modified_base 71..73: mod_base = OTHER; note = uracil
  modified_base 82..83: mod_base = OTHER; note = uracil
  modified_base 86..87: mod_base = OTHER; note = uracil
  modified_base 97: mod_base = OTHER; note = uracil
  modified_base 100: mod_base = OTHER; note = uracil
  modified_base 107..109: mod_base = OTHER; note = uracil
  modified_base 116..117: mod_base = OTHER; note = uracil
  modified_base 119: mod_base = OTHER; note = uracil
  modified_base 125: mod_base = OTHER; note = uracil
  modified_base 127: mod_base = OTHER; note = uracil
  modified_base 130: mod_base = OTHER; note = uracil
  modified_base 134: mod_base = OTHER; note = uracil
  modified_base 137: mod_base = OTHER; note = uracil
  modified_base 140: mod_base = OTHER; note = uracil
  modified_base 144: mod_base = OTHER; note = uracil
  modified_base 146..148: mod_base = OTHER; note = uracil
  modified_base 152: mod_base = OTHER; note = uracil
  modified_base 154: mod_base = OTHER; note = uracil
  modified_base 156: mod_base = OTHER; note = uracil
  modified_base 160: mod_base = OTHER; note = uracil
  modified_base 166: mod_base = OTHER; note = uracil
  modified_base 174..176: mod_base = OTHER; note = uracil
  modified_base 178: mod_base = OTHER; note = uracil
  modified_base 181: mod_base = OTHER; note = uracil
  modified_base 185: mod_base = OTHER; note = uracil
  modified_base 188: mod_base = OTHER; note = uracil
  modified_base 191..192: mod_base = OTHER; note = uracil
  modified_base 198..199: mod_base = OTHER; note = uracil
  modified_base 201..202: mod_base = OTHER; note = uracil
  modified_base 215: mod_base = OTHER; note = uracil
  modified_base 218..219: mod_base = OTHER; note = uracil
  modified_base 222: mod_base = OTHER; note = uracil
  modified_base 227: mod_base = OTHER; note = uracil
  modified_base 232: mod_base = OTHER; note = uracil
  modified_base 238: mod_base = OTHER; note = uracil
  modified_base 240: mod_base = OTHER; note = uracil
  modified_base 254: mod_base = OTHER; note = uracil
  modified_base 256: mod_base = OTHER; note = uracil
  modified_base 275: mod_base = OTHER; note = uracil
  modified_base 277: mod_base = OTHER; note = uracil
  modified_base 84: mod_base = m5c
  modified_base 89: mod_base = m5c
  modified_base 101: mod_base = m5c
  modified_base 162: mod_base = m5c
  modified_base 193: mod_base = m5c
  variation 149: note = CpG site, residue is C if methylated or T(=U) if unmethylated
tgggttttgaatggataattaggtttttggtttatgtggtttagttggtggttttgaaaataaattagtttttaagtgtggttcgttacggggttgttgtcggggtttttagaggtttttggtgtatagtagatagttgtttttttttygttttttagatacggtttaggtggttttttgttttttgtaattcggattttttttgttgtatttttagtttgtagaattgagttgatttatttttatggaaaaatatattttaaatatttagttgtttatggagagttttgtttaaaatta

SEQ ID NO: 379 - DNA, 300 bp, synthetic construct
  source 1..300: mol_type = other DNA
  modified_base 2..3: mod_base = OTHER; note = uracil
  modified_base 5..6: mod_base = OTHER; note = uracil
  modified_base 10..11: mod_base = OTHER; note = uracil
  modified_base 18..22: mod_base = OTHER; note = uracil
  modified_base 24: mod_base = OTHER; note = uracil
  modified_base 30..31: mod_base = OTHER; note = uracil
  modified_base 35..37: mod_base = OTHER; note = uracil
  modified_base 49..50: mod_base = OTHER; note = uracil
  modified_base 52: mod_base = OTHER; note = uracil
  modified_base 54: mod_base = OTHER; note = uracil
  modified_base 60..61: mod_base = OTHER; note = uracil
  modified_base 63: mod_base = OTHER; note = uracil
  modified_base 68: mod_base = OTHER; note = uracil
  modified_base 71: mod_base = OTHER; note = uracil
  modified_base 74: mod_base = OTHER; note = uracil
  modified_base 77: mod_base = OTHER; note = uracil
  modified_base 82: mod_base = OTHER; note = uracil
  modified_base 89: mod_base = OTHER; note = uracil
  modified_base 93: mod_base = OTHER; note = uracil
  modified_base 95: mod_base = OTHER; note = uracil
  modified_base 98: mod_base = OTHER; note = uracil
  modified_base 106: mod_base = OTHER; note = uracil
  modified_base 109: mod_base = OTHER; note = uracil
  modified_base 111: mod_base = OTHER; note = uracil
  modified_base 113: mod_base = OTHER; note = uracil
  modified_base 117: mod_base = OTHER; note = uracil
  modified_base 119: mod_base = OTHER; note = uracil
  modified_base 121: mod_base = OTHER; note = uracil
  modified_base 124: mod_base = OTHER; note = uracil
  modified_base 131: mod_base = OTHER; note = uracil
  modified_base 136: mod_base = OTHER; note = uracil
  modified_base 140: mod_base = OTHER; note = uracil
  modified_base 146..147: mod_base = OTHER; note = uracil
  modified_base 150: mod_base = OTHER; note = uracil
  modified_base 162: mod_base = OTHER; note = uracil
  modified_base 166: mod_base = OTHER; note = uracil
  modified_base 180..181: mod_base = OTHER; note = uracil
  modified_base 185..187: mod_base = OTHER; note = uracil
  modified_base 192: mod_base = OTHER; note = uracil
  modified_base 203: mod_base = OTHER; note = uracil
  modified_base 213: mod_base = OTHER; note = uracil
  modified_base 226: mod_base = OTHER; note = uracil
  modified_base 230..233: mod_base = OTHER; note = uracil
  modified_base 236: mod_base = OTHER; note = uracil
  modified_base 239: mod_base = OTHER; note = uracil
  modified_base 241: mod_base = OTHER; note = uracil
  modified_base 244: mod_base = OTHER; note = uracil
  modified_base 257: mod_base = OTHER; note = uracil
  modified_base 259..260: mod_base = OTHER; note = uracil
  modified_base 270: mod_base = OTHER; note = uracil
  modified_base 272: mod_base = OTHER; note = uracil
  modified_base 274: mod_base = OTHER; note = uracil
  modified_base 282: mod_base = OTHER; note = uracil
  modified_base 284..288: mod_base = OTHER; note = uracil
  modified_base 292: mod_base = OTHER; note = uracil
  modified_base 294: mod_base = OTHER; note = uracil
  modified_base 297..300: mod_base = OTHER; note = uracil
  modified_base 12: mod_base = m5c
  modified_base 83: mod_base = m5c
  modified_base 141: mod_base = m5c
  modified_base 182: mod_base = m5c
  modified_base 264: mod_base = m5c
  modified_base 279: mod_base = m5c
  variation 151: note = CpG site, residue is C if methylated or T(=U) if unmethylated
gtttttagattcgaaattttttattgaagttatttttaggaggaggggttttattggggttttaaggtagtattagtattttcggtgataggtatagtaatttattagtttattggttttttattgagaataaggtaagtcggggtttgtygagggtatgataggtagggagtgatgggttcggtttagggtaggagggagatagaaatgggtaggaagaggaggttgtttttagtagtatttttgagaggaggagtatttttcggggatattttggacggtatttttaagtatagtttt

SEQ ID NO: 380 - DNA, 300 bp, synthetic construct
  source 1..300: mol_type = other DNA
  modified_base 5: mod_base = OTHER; note = uracil
  modified_base 10: mod_base = OTHER; note = uracil
  modified_base 20: mod_base = OTHER; note = uracil
  modified_base 24..25: mod_base = OTHER; note = uracil
  modified_base 33..35: mod_base = OTHER; note = uracil
  modified_base 45: mod_base = OTHER; note = uracil
  modified_base 47..48: mod_base = OTHER; note = uracil
  modified_base 50..51: mod_base = OTHER; note = uracil
  modified_base 53: mod_base = OTHER; note = uracil
  modified_base 55: mod_base = OTHER; note = uracil
  modified_base 63: mod_base = OTHER; note = uracil
  modified_base 66: mod_base = OTHER; note = uracil
  modified_base 73: mod_base = OTHER; note = uracil
  modified_base 76..77: mod_base = OTHER; note = uracil
  modified_base 79..80: mod_base = OTHER; note = uracil
  modified_base 82: mod_base = OTHER; note = uracil
  modified_base 85..86: mod_base = OTHER; note = uracil
  modified_base 89..91: mod_base = OTHER; note = uracil
  modified_base 96: mod_base = OTHER; note = uracil
  modified_base 100: mod_base = OTHER; note = uracil
  modified_base 102..104: mod_base = OTHER; note = uracil
  modified_base 106..107: mod_base = OTHER; note = uracil
  modified_base 110..112: mod_base = OTHER; note = uracil
  modified_base 117: mod_base = OTHER; note = uracil
  modified_base 122..124: mod_base = OTHER; note = uracil
  modified_base 127: mod_base = OTHER; note = uracil
  modified_base 129: mod_base = OTHER; note = uracil
  modified_base 131..133: mod_base = OTHER; note = uracil
  modified_base 136..137: mod_base = OTHER; note = uracil
  modified_base 141: mod_base = OTHER; note = uracil
  modified_base 145..147: mod_base = OTHER; note = uracil
  modified_base 152: mod_base = OTHER; note = uracil
  modified_base 156..158: mod_base = OTHER; note = uracil
  modified_base 162: mod_base = OTHER; note = uracil
  modified_base 166..167: mod_base = OTHER; note = uracil
  modified_base 173: mod_base = OTHER; note = uracil
  modified_base 175: mod_base = OTHER; note = uracil
  modified_base 185..186: mod_base = OTHER; note = uracil
  modified_base 193: mod_base = OTHER; note = uracil
  modified_base 204: mod_base = OTHER; note = uracil
  modified_base 209..210: mod_base = OTHER; note = uracil
  modified_base 214: mod_base = OTHER; note = uracil
  modified_base 216: mod_base = OTHER; note = uracil
  modified_base 225: mod_base = OTHER; note = uracil
  modified_base 231: mod_base = OTHER; note = uracil
  modified_base 234..235: mod_base = OTHER; note = uracil
  modified_base 242..245: mod_base = OTHER; note = uracil
  modified_base 253..256: mod_base = OTHER; note = uracil
  modified_base 258..259: mod_base = OTHER; note = uracil
  modified_base 261..262: mod_base = OTHER; note = uracil
  modified_base 272: mod_base = OTHER; note = uracil
  modified_base 275: mod_base = OTHER; note = uracil
  modified_base 293: mod_base = OTHER; note = uracil
  modified_base 300: mod_base = OTHER; note = uracil
  modified_base 21: mod_base = m5c
  modified_base 36: mod_base = m5c
  modified_base 118: mod_base = m5c
  modified_base 159: mod_base = m5c
  modified_base 217: mod_base = m5c
  modified_base 288: mod_base = m5c
  variation 149: note = CpG site, residue is C if methylated or T(=U) if unmethylated
ggggttgtgtttgggggtgtcgtttagagtgttttcgaaaggtgtttttttttttagaagtgttgttggggatagttttttttttttgtttatttttgttttttttttgttttgggtcgggtttattattttttgtttgttatattttyggtaggtttcggtttgttttgtttttagtagagagttagtgagttgataaattgttgtgtttgttatcggaaatgttgatgttgttttgaggttttagtgaggtttttttttttgggaatggttttagtgggggatttcgggtttggaggt

SEQ ID NO: 381 - DNA, 300 bp, synthetic construct
  source 1..300: mol_type = other DNA
  modified_base 7: mod_base = OTHER; note = uracil
  modified_base 10..11: mod_base = OTHER; note = uracil
  modified_base 15: mod_base = OTHER; note = uracil
  modified_base 26: mod_base = OTHER; note = uracil
  modified_base 44: mod_base = OTHER; note = uracil
  modified_base 56: mod_base = OTHER; note = uracil
  modified_base 66: mod_base = OTHER; note = uracil
  modified_base 68: mod_base = OTHER; note = uracil
  modified_base 70: mod_base = OTHER; note = uracil
  modified_base 82: mod_base = OTHER; note = uracil
  modified_base 85: mod_base = OTHER; note = uracil
  modified_base 94: mod_base = OTHER; note = uracil
  modified_base 98..99: mod_base = OTHER; note = uracil
  modified_base 101..102: mod_base = OTHER; note = uracil
  modified_base 108: mod_base = OTHER; note = uracil
  modified_base 110: mod_base = OTHER; note = uracil
  modified_base 112: mod_base = OTHER; note = uracil
  modified_base 119: mod_base = OTHER; note = uracil
  modified_base 121: mod_base = OTHER; note = uracil
  modified_base 125..126: mod_base = OTHER; note = uracil
  modified_base 132: mod_base = OTHER; note = uracil
  modified_base 137..139: mod_base = OTHER; note = uracil
  modified_base 141: mod_base = OTHER; note = uracil
  modified_base 153: mod_base = OTHER; note = uracil
  modified_base 160: mod_base = OTHER; note = uracil
  modified_base 163..164: mod_base = OTHER; note = uracil
  modified_base 172: mod_base = OTHER; note = uracil
  modified_base 175..177: mod_base = OTHER; note = uracil
  modified_base 183: mod_base = OTHER; note = uracil
  modified_base 204: mod_base = OTHER; note = uracil
  modified_base 210..211: mod_base = OTHER; note = uracil
  modified_base 220: mod_base = OTHER; note = uracil
  modified_base 239: mod_base = OTHER; note = uracil
  modified_base 242..244: mod_base = OTHER; note = uracil
  modified_base 250..252: mod_base = OTHER; note = uracil
  modified_base 254: mod_base = OTHER; note = uracil
  modified_base 256..257: mod_base = OTHER; note = uracil
  modified_base 260..261: mod_base = OTHER; note = uracil
  modified_base 265..267: mod_base = OTHER; note = uracil
  modified_base 271..273: mod_base = OTHER; note = uracil
  modified_base 281: mod_base = OTHER; note = uracil
  modified_base 284: mod_base = OTHER; note = uracil
  modified_base 293: mod_base = OTHER; note = uracil
  modified_base 295: mod_base = OTHER; note = uracil
  modified_base 17: mod_base = m5c
  modified_base 36: mod_base = m5c
  modified_base 54: mod_base = m5c
  modified_base 60: mod_base = m5c
  modified_base 95: mod_base = m5c
  modified_base 142: mod_base = m5c
  modified_base 148: mod_base = m5c
  modified_base 161: mod_base = m5c
  modified_base 186: mod_base = m5c
  modified_base 205: mod_base = m5c
  modified_base 212: mod_base = m5c
  modified_base 224: mod_base = m5c
  modified_base 237: mod_base = m5c
  modified_base 245: mod_base = m5c
  modified_base 248: mod_base = m5c
  modified_base 269: mod_base = m5c
  modified_base 275: mod_base = m5c
  modified_base 278: mod_base = m5c
  modified_base 282: mod_base = m5c
  modified_base 290: mod_base = m5c
  modified_base 296: mod_base = m5c
  modified_base 298: mod_base = m5c
  variation 104: note = CpG site, residue is C if methylated or T(=U) if unmethylated
  variation 196: note = CpG site, residue is C if methylated or T(=U) if unmethylated
tgagagtagttagatacgtagtgattagggaaagtcgaaagtgtagatgggttcgtaaacgtggattttttagttttgggtttgtagatggggtcggttattaygtgttttttgagttttttttttaagtatagattttttcggagacggaatattgtttcgtttttaattttttttaggagttgcggaggaaggygtgagaatcggagttcggggtgatttgcgggggaggggatcgttttttcgtcgtttatatttgtttaatttacgtttacggcggtcgtaaaggcgatatcgcgt

SEQ ID NO: 382 - DNA, 300 bp, synthetic construct
  source 1..300: mol_type = other DNA
  modified_base 12..13: mod_base = OTHER; note = uracil
  modified_base 21: mod_base = OTHER; note = uracil
  modified_base 24: mod_base = OTHER; note = uracil
  modified_base 42: mod_base = OTHER; note = uracil
  modified_base 67..70: mod_base = OTHER; note = uracil
  modified_base 72..75: mod_base = OTHER; note = uracil
  modified_base 78: mod_base = OTHER; note = uracil
  modified_base 83: mod_base = OTHER; note = uracil
  modified_base 85..87: mod_base = OTHER; note = uracil
  modified_base 92: mod_base = OTHER; note = uracil
  modified_base 94: mod_base = OTHER; note = uracil
  modified_base 100: mod_base = OTHER; note = uracil
  modified_base 102: mod_base = OTHER; note = uracil
  modified_base 106..107: mod_base = OTHER; note = uracil
  modified_base 110..111: mod_base = OTHER; note = uracil
  modified_base 113: mod_base = OTHER; note = uracil
  modified_base 116: mod_base = OTHER; note = uracil
  modified_base 119: mod_base = OTHER; note = uracil
  modified_base 121..122: mod_base = OTHER; note = uracil
  modified_base 144: mod_base = OTHER; note = uracil
  modified_base 151: mod_base = OTHER; note = uracil
  modified_base 155: mod_base = OTHER; note = uracil
  modified_base 157: mod_base = OTHER; note = uracil
  modified_base 167: mod_base = OTHER; note = uracil
  modified_base 172: mod_base = OTHER; note = uracil
  modified_base 185: mod_base = OTHER; note = uracil
  modified_base 187: mod_base = OTHER; note = uracil
  modified_base 194: mod_base = OTHER; note = uracil
  modified_base 204: mod_base = OTHER; note = uracil
  modified_base 208..211: mod_base = OTHER; note = uracil
  modified_base 214: mod_base = OTHER; note = uracil
  modified_base 217: mod_base = OTHER; note = uracil
  modified_base 221..223: mod_base = OTHER; note = uracil
  modified_base 228: mod_base = OTHER; note = uracil
  modified_base 237..238: mod_base = OTHER; note = uracil
  modified_base 250..252: mod_base = OTHER; note = uracil
  modified_base 255: mod_base = OTHER; note = uracil
  modified_base 258: mod_base = OTHER; note = uracil
  modified_base 260: mod_base = OTHER; note = uracil
  modified_base 267: mod_base = OTHER; note = uracil
  modified_base 271..273: mod_base = OTHER; note = uracil
  modified_base 278: mod_base = OTHER; note = uracil
  modified_base 280: mod_base = OTHER; note = uracil
  modified_base 288: mod_base = OTHER; note = uracil
  modified_base 292: mod_base = OTHER; note = uracil
  modified_base 295: mod_base = OTHER; note = uracil
  modified_base 297: mod_base = OTHER; note = uracil
  modified_base 299: mod_base = OTHER; note = uracil
  modified_base 2: mod_base = m5c
  modified_base 4: mod_base = m5c
  modified_base 10: mod_base = m5c
  modified_base 18: mod_base = m5c
  modified_base 22: mod_base = m5c
  modified_base 25: mod_base = m5c
  modified_base 31: mod_base = m5c
  modified_base 52: mod_base = m5c
  modified_base 55: mod_base = m5c
  modified_base 63: mod_base = m5c
  modified_base 76: mod_base = m5c
  modified_base 88: mod_base = m5c
  modified_base 95: mod_base = m5c
  modified_base 114: mod_base = m5c
  modified_base 139: mod_base = m5c
  modified_base 152: mod_base = m5c
  modified_base 158: mod_base = m5c
  modified_base 205: mod_base = m5c
  modified_base 240: mod_base = m5c
  modified_base 246: mod_base = m5c
  modified_base 264: mod_base = m5c
  modified_base 283: mod_base = m5c
  variation 104: note = CpG site, residue is C if methylated or T(=U) if unmethylated
  variation 196: note = CpG site, residue is C if methylated or T(=U) if unmethylated
acgcggtgtcgtttttgcggtcgtcgtgggcgtgggttaggtaggtgtgggcgacggggaagcgattttttttttcgtaagttatttcgggtttcggtttttaygttttttttcgtagtttttgggaagaattaaaggcggaataatgtttcgttttcggagggatttgtatttggaaagagaatttagagagtaygtggtggtcggttttatttgtagatttaaaattagagagtttacgtttgcgaatttatttgtattttcgattttttttgattattacgtgtttggttgttttta

SEQ ID NO: 383 - DNA, 300 bp, synthetic construct
  source 1..300: mol_type = other DNA
  modified_base 2: mod_base = OTHER; note = uracil
  modified_base 25: mod_base = OTHER; note = uracil
  modified_base 28: mod_base = OTHER; note = uracil
  modified_base 34: mod_base = OTHER; note = uracil
  modified_base 39: mod_base = OTHER; note = uracil
  modified_base 45: mod_base = OTHER; note = uracil
  modified_base 50: mod_base = OTHER; note = uracil
  modified_base 56: mod_base = OTHER; note = uracil
  modified_base 58: mod_base = OTHER; note = uracil
  modified_base 64: mod_base = OTHER; note = uracil
  modified_base 68: mod_base = OTHER; note = uracil
  modified_base 70: mod_base = OTHER; note = uracil
  modified_base 74: mod_base = OTHER; note = uracil
  modified_base 78: mod_base = OTHER; note = uracil
  modified_base 82: mod_base = OTHER; note = uracil
  modified_base 87: mod_base = OTHER; note = uracil
  modified_base 93: mod_base = OTHER; note = uracil
  modified_base 97: mod_base = OTHER; note = uracil
  modified_base 102: mod_base = OTHER; note = uracil
  modified_base 112..113: mod_base = OTHER; note = uracil
  modified_base 118: mod_base = OTHER; note = uracil
  modified_base 122: mod_base = OTHER; note = uracil
  modified_base 137: mod_base = OTHER; note = uracil
  modified_base 140..141: mod_base = OTHER; note = uracil
  modified_base 145: mod_base = OTHER; note = uracil
  modified_base 148..149: mod_base = OTHER; note = uracil
  modified_base 153: mod_base = OTHER; note = uracil
  modified_base 156..157: mod_base = OTHER; note = uracil
  modified_base 167..168: mod_base = OTHER; note = uracil
  modified_base 171: mod_base = OTHER; note = uracil
  modified_base 174..175: mod_base = OTHER; note = uracil
  modified_base 178: mod_base = OTHER; note = uracil
  modified_base 182: mod_base = OTHER; note = uracil
  modified_base 184..185: mod_base = OTHER; note = uracil
  modified_base 187..188: mod_base = OTHER; note = uracil
  modified_base 191: mod_base = OTHER; note = uracil
  modified_base 194: mod_base = OTHER; note = uracil
  modified_base 201: mod_base = OTHER; note = uracil
  modified_base 204: mod_base = OTHER; note = uracil
  modified_base 207..208: mod_base = OTHER; note = uracil
  modified_base 210: mod_base = OTHER; note = uracil
  modified_base 212: mod_base = OTHER; note = uracil
  modified_base 220..221: mod_base = OTHER; note = uracil
  modified_base 225: mod_base = OTHER; note = uracil
  modified_base 227: mod_base = OTHER; note = uracil
  modified_base 229: mod_base = OTHER; note = uracil
  modified_base 233: mod_base = OTHER; note = uracil
  modified_base 235..236: mod_base = OTHER; note = uracil
  modified_base 240..242: mod_base = OTHER; note = uracil
  modified_base 244: mod_base = OTHER; note = uracil
  modified_base 252..253: mod_base = OTHER; note = uracil
  modified_base 258: mod_base = OTHER; note = uracil
  modified_base 261: mod_base = OTHER; note = uracil
  modified_base 267: mod_base = OTHER; note = uracil
  modified_base 269..270: mod_base = OTHER; note = uracil
  modified_base 275: mod_base = OTHER; note = uracil
  modified_base 281..283: mod_base = OTHER; note = uracil
  modified_base 291: mod_base = OTHER; note = uracil
  modified_base 298..300: mod_base = OTHER; note = uracil
  modified_base 6: mod_base = m5c
  modified_base 17: mod_base = m5c
  modified_base 36: mod_base = m5c
  modified_base 47: mod_base = m5c
  modified_base 60: mod_base = m5c
  modified_base 76: mod_base = m5c
  modified_base 79: mod_base = m5c
  modified_base 94: mod_base = m5c
  modified_base 133: mod_base = m5c
  modified_base 138: mod_base = m5c
  modified_base 160: mod_base = m5c
  modified_base 262: mod_base = m5c
  modified_base 284: mod_base = m5c
  variation 150: note = CpG site, residue is C if methylated or T(=U) if unmethylated
ataagcggttggatttcgagaggatattaagagtacgttaagagtacgttaagagtatacggataggtattggtacgtcggtaggttattgatcggtagaatagagtttggttagggttgttagagaagagtcgggtcgttaagtagttygatttttagcggaaaattatttgttttttggtttttttatttgttgagagttatttttatttaataaaattttgtatttattttttaaatttatatgagatttaattttttcggtatattaaggtaggaatttcgagatatagaaagttt

SEQ ID NO: 384 - DNA, 300 bp, synthetic construct
  source 1..300: mol_type = other DNA
  modified_base 4: mod_base = OTHER; note = uracil
  modified_base 8: mod_base = OTHER; note = uracil
  modified_base 14: mod_base = OTHER; note = uracil
  modified_base 23..24: mod_base = OTHER; note = uracil
  modified_base 27..28: mod_base = OTHER; note = uracil
  modified_base 37: mod_base = OTHER; note = uracil
  modified_base 52: mod_base = OTHER; note = uracil
  modified_base 54: mod_base = OTHER; note = uracil
  modified_base 77: mod_base = OTHER; note = uracil
  modified_base 101: mod_base = OTHER; note = uracil
  modified_base 103: mod_base = OTHER; note = uracil
  modified_base 105: mod_base = OTHER; note = uracil
  modified_base 108: mod_base = OTHER; note = uracil
  modified_base 120..121: mod_base = OTHER; note = uracil
  modified_base 128: mod_base = OTHER; note = uracil
  modified_base 139: mod_base = OTHER; note = uracil
  modified_base 142: mod_base = OTHER; note = uracil
  modified_base 154: mod_base = OTHER; note = uracil
  modified_base 157: mod_base = OTHER; note = uracil
  modified_base 165..166: mod_base = OTHER; note = uracil
  modified_base 170: mod_base = OTHER; note = uracil
  modified_base 172: mod_base = OTHER; note = uracil
  modified_base 175: mod_base = OTHER; note = uracil
  modified_base 177: mod_base = OTHER; note = uracil
  modified_base 181: mod_base = OTHER; note = uracil
  modified_base 184..186: mod_base = OTHER; note = uracil
  modified_base 190..191: mod_base = OTHER; note = uracil
  modified_base 195: mod_base = OTHER; note = uracil
  modified_base 197: mod_base = OTHER; note = uracil
  modified_base 202: mod_base = OTHER; note = uracil
  modified_base 205: mod_base = OTHER; note = uracil
  modified_base 210: mod_base = OTHER; note = uracil
  modified_base 216..217: mod_base = OTHER; note = uracil
  modified_base 220: mod_base = OTHER; note = uracil
  modified_base 228..229: mod_base = OTHER; note = uracil
  modified_base 234..235: mod_base = OTHER; note = uracil
  modified_base 239: mod_base = OTHER; note = uracil
  modified_base 246: mod_base = OTHER; note = uracil
  modified_base 248: mod_base = OTHER; note = uracil
  modified_base 257: mod_base = OTHER; note = uracil
  modified_base 259: mod_base = OTHER; note = uracil
  modified_base 268: mod_base = OTHER; note = uracil
  modified_base 270: mod_base = OTHER; note = uracil
  modified_base 278..279: mod_base = OTHER; note = uracil
  modified_base 281: mod_base = OTHER; note = uracil
  modified_base 289..290: mod_base = OTHER; note = uracil
  modified_base 293: mod_base = OTHER; note = uracil
  modified_base 296: mod_base = OTHER; note = uracil
  modified_base 16: mod_base = m5c
  modified_base 38: mod_base = m5c
  modified_base 140: mod_base = m5c
  modified_base 162: mod_base = m5c
  modified_base 167: mod_base = m5c
  modified_base 206: mod_base = m5c
  modified_base 221: mod_base = m5c
  modified_base 224: mod_base = m5c
  modified_base 240: mod_base = m5c
  modified_base 253: mod_base = m5c
  modified_base 264: mod_base = m5c
  modified_base 283: mod_base = m5c
  modified_base 294: mod_base = m5c
  variation 150: note = CpG site, residue is C if methylated or T(=U) if unmethylated
gggttttttgtatttcggggtttttgttttggtgtatcggaagaattggattttatgtgggtttggagaatgagtgtaaggttttattgagtggaagtagtttttagtagatggaggagttagaaggtagatggtttttcgttggaagtygggttgtttggcggttcgatttttttttgatagttttggttaaattttgttttgtcggttaatgatttgtcggcgtgttagtgtttgttcgtgtgtttttgacgtgtttttgacgtgtttttgatgttttttcgaaatttaatcgtttgt

SEQ ID NO: 385 - DNA, 300 bp, synthetic construct
  source 1..300: mol_type = other DNA
  modified_base 2: mod_base = OTHER; note = uracil
  modified_base 10: mod_base = OTHER; note = uracil
  modified_base 24: mod_base = OTHER; note = uracil
  modified_base 27..28: mod_base = OTHER; note = uracil
  modified_base 32..33: mod_base = OTHER; note = uracil
  modified_base 36: mod_base = OTHER; note = uracil
  modified_base 46..48: mod_base = OTHER; note = uracil
  modified_base 52: mod_base = OTHER; note = uracil
  modified_base 54: mod_base = OTHER; note = uracil
  modified_base 57: mod_base = OTHER; note = uracil
  modified_base 76: mod_base = OTHER; note = uracil
  modified_base 92..93: mod_base = OTHER; note = uracil
  modified_base 99..102: mod_base = OTHER; note = uracil
  modified_base 105: mod_base = OTHER; note = uracil
  modified_base 107: mod_base = OTHER; note = uracil
  modified_base 117: mod_base = OTHER; note = uracil
  modified_base 132: mod_base = OTHER; note = uracil
  modified_base 134: mod_base = OTHER; note = uracil
  modified_base 142: mod_base = OTHER; note = uracil
  modified_base 156: mod_base = OTHER; note = uracil
  modified_base 159..160: mod_base = OTHER; note = uracil
  modified_base 165: mod_base = OTHER; note = uracil
  modified_base 168: mod_base = OTHER; note = uracil
  modified_base 178..180: mod_base = OTHER; note = uracil
  modified_base 184: mod_base = OTHER; note = uracil
  modified_base 186: mod_base = OTHER; note = uracil
  modified_base 189: mod_base = OTHER; note = uracil
  modified_base 196: mod_base = OTHER; note = uracil
  modified_base 198: mod_base = OTHER; note = uracil
  modified_base 208: mod_base = OTHER; note = uracil
  modified_base 227..228: mod_base = OTHER; note = uracil
  modified_base 235..237: mod_base = OTHER; note = uracil
  modified_base 240: mod_base = OTHER; note = uracil
  modified_base 243: mod_base = OTHER; note = uracil
  modified_base 245: mod_base = OTHER; note = uracil
  modified_base 252: mod_base = OTHER; note = uracil
  modified_base 258: mod_base = OTHER; note = uracil
  modified_base 267: mod_base = OTHER; note = uracil
  modified_base 269: mod_base = OTHER; note = uracil
  modified_base 275: mod_base = OTHER; note = uracil
  modified_base 284: mod_base = OTHER; note = uracil
  modified_base 293: mod_base = OTHER; note = uracil
  modified_base 18: mod_base = m5c
  modified_base 77: mod_base = m5c
  modified_base 90: mod_base = m5c
  modified_base 209: mod_base = m5c
  modified_base 276: mod_base = m5c
  variation 150: note = CpG site, residue is C if methylated or T(=U) if unmethylated
atttgaagttaggagttcgtgaatagtttggttaatatggtgaaattttgtttttattaaaaaaagaaaaattagtcgggtgtggtgggcgtttgtaattttagtattttgggaggttgaggtgggtggattatttgaagttaggagttygtgaatagtttgattaatatggtgaaattttgtttttattaaaaatataaaaattagtcgggtgtggtggtgggtgtttgtaattttagttatttaggagattgaggtaggaggattatttgaatcggggaggtagaggttgtagagagt

SEQ ID NO: 386 - DNA, 300 bp, synthetic construct
  source 1..300: mol_type = other DNA
  modified_base 1: mod_base = OTHER; note = uracil
  modified_base 3: mod_base = OTHER; note = uracil
  modified_base 5: mod_base = OTHER; note = uracil
  modified_base 8: mod_base = OTHER; note = uracil
  modified_base 11..12: mod_base = OTHER; note = uracil
  modified_base 14: mod_base = OTHER; note = uracil
  modified_base 17..18: mod_base = OTHER; note = uracil
  modified_base 20..22: mod_base = OTHER; note = uracil
  modified_base 28: mod_base = OTHER; note = uracil
  modified_base 36..37: mod_base = OTHER; note = uracil
  modified_base 39..40: mod_base = OTHER; note = uracil
  modified_base 43..44: mod_base = OTHER; note = uracil
  modified_base 46: mod_base = OTHER; note = uracil
  modified_base 50: mod_base = OTHER; note = uracil
  modified_base 52..53: mod_base = OTHER; note = uracil
  modified_base 61: mod_base = OTHER; note = uracil
  modified_base 70: mod_base = OTHER; note = uracil
  modified_base 74: mod_base = OTHER; note = uracil
  modified_base 76..78: mod_base = OTHER; note = uracil
  modified_base 80..81: mod_base = OTHER; note = uracil
  modified_base 83..84: mod_base = OTHER; note = uracil
  modified_base 86: mod_base = OTHER; note = uracil
  modified_base 88..89: mod_base = OTHER; note = uracil
  modified_base 93: mod_base = OTHER; note = uracil
  modified_base 118: mod_base = OTHER; note = uracil
  modified_base 126: mod_base = OTHER; note = uracil
  modified_base 128..129: mod_base = OTHER; note = uracil
  modified_base 138: mod_base = OTHER; note = uracil
  modified_base 142: mod_base = OTHER; note = uracil
  modified_base 147: mod_base = OTHER; note = uracil
  modified_base 153: mod_base = OTHER; note = uracil
  modified_base 155..156: mod_base = OTHER; note = uracil
  modified_base 160: mod_base = OTHER; note = uracil
  modified_base 163: mod_base = OTHER; note = uracil
  modified_base 171..172: mod_base = OTHER; note = uracil
  modified_base 174..176: mod_base = OTHER; note = uracil
  modified_base 178..179: mod_base = OTHER; note = uracil
  modified_base 181: mod_base = OTHER; note = uracil
  modified_base 184..185: mod_base = OTHER; note = uracil
  modified_base 187..189: mod_base = OTHER; note = uracil
  modified_base 196: mod_base = OTHER; note = uracil
  modified_base 205: mod_base = OTHER; note = uracil
  modified_base 211..213: mod_base = OTHER; note = uracil
  modified_base 215..216: mod_base = OTHER; note = uracil
  modified_base 218: mod_base = OTHER; note = uracil
  modified_base 220..221: mod_base = OTHER; note = uracil
  modified_base 225: mod_base = OTHER; note = uracil
  modified_base 234: mod_base = OTHER; note = uracil
  modified_base 250: mod_base = OTHER; note = uracil
  modified_base 258: mod_base = OTHER; note = uracil
  modified_base 260..261: mod_base = OTHER; note = uracil
  modified_base 269..270: mod_base = OTHER; note = uracil
  modified_base 274: mod_base = OTHER; note = uracil
  modified_base 279: mod_base = OTHER; note = uracil
  modified_base 285: mod_base = OTHER; note = uracil
  modified_base 287..288: mod_base = OTHER; note = uracil
  modified_base 292: mod_base = OTHER; note = uracil
  modified_base 295: mod_base = OTHER; note = uracil
  modified_base 23: mod_base = m5c
  modified_base 90: mod_base = m5c
  modified_base 209: mod_base = m5c
  modified_base 222: mod_base = m5c
  modified_base 281: mod_base = m5c
  variation 149: note = CpG site, residue is C if methylated or T(=U) if unmethylated
ttttttgtaatttttgttttttcggtttaagtgatttttttgttttagttttttgagtagttgggattataggtatttattattatattcggttaatttttgtgtttttagtagagatagggttttattatgttgattaggttgtttaygaatttttgattttaagtgatttatttattttagttttttaaagtgttggggttataggcgtttattatattcggttaatttttttttttttagtagagatagggttttattatgttggttaggttgtttacgaatttttgattttaagtg

SEQ ID NO: 387 - DNA, 300 bp, synthetic construct
  source 1..300: mol_type = other DNA
  modified_base 5: mod_base = OTHER; note = uracil
  modified_base 11..12: mod_base = OTHER; note = uracil
  modified_base 15..16: mod_base = OTHER; note = uracil
  modified_base 19: mod_base = OTHER; note = uracil
  modified_base 25: mod_base = OTHER; note = uracil
  modified_base 29: mod_base = OTHER; note = uracil
  modified_base 36: mod_base = OTHER; note = uracil
  modified_base 40: mod_base = OTHER; note = uracil
  modified_base 43: mod_base = OTHER; note = uracil
  modified_base 46: mod_base = OTHER; note = uracil
  modified_base 49..50: mod_base = OTHER; note = uracil
  modified_base 58: mod_base = OTHER; note = uracil
  modified_base 62: mod_base = OTHER; note = uracil
  modified_base 64: mod_base = OTHER; note = uracil
  modified_base 66: mod_base = OTHER; note = uracil
  modified_base 68: mod_base = OTHER; note = uracil
  modified_base 74..75: mod_base = OTHER; note = uracil
  modified_base 79: mod_base = OTHER; note = uracil
  modified_base 83..84: mod_base = OTHER; note = uracil
  modified_base 89..90: mod_base = OTHER; note = uracil
  modified_base 94..95: mod_base = OTHER; note = uracil
  modified_base 97: mod_base = OTHER; note = uracil
  modified_base 100: mod_base = OTHER; note = uracil
  modified_base 104: mod_base = OTHER; note = uracil
  modified_base 110: mod_base = OTHER; note = uracil
  modified_base 114..115: mod_base = OTHER; note = uracil
  modified_base 118: mod_base = OTHER; note = uracil
  modified_base 121: mod_base = OTHER; note = uracil
  modified_base 124..125: mod_base = OTHER; note = uracil
  modified_base 135..137: mod_base = OTHER; note = uracil
  modified_base 142: mod_base = OTHER; note = uracil
  modified_base 145: mod_base = OTHER; note = uracil
  modified_base 148..149: mod_base = OTHER; note = uracil
  modified_base 152: mod_base = OTHER; note = uracil
  modified_base 155: mod_base = OTHER; note = uracil
  modified_base 159..162: mod_base = OTHER; note = uracil
  modified_base 165..168: mod_base = OTHER; note = uracil
  modified_base 170: mod_base = OTHER; note = uracil
  modified_base 177: mod_base = OTHER; note = uracil
  modified_base 179..180: mod_base = OTHER; note = uracil
  modified_base 183: mod_base = OTHER; note = uracil
  modified_base 188..189: mod_base = OTHER; note = uracil
  modified_base 191: mod_base = OTHER; note = uracil
  modified_base 197: mod_base = OTHER; note = uracil
  modified_base 199: mod_base = OTHER; note = uracil
  modified_base 201..202: mod_base = OTHER; note = uracil
  modified_base 210: mod_base = OTHER; note = uracil
  modified_base 217: mod_base = OTHER; note = uracil
  modified_base 219: mod_base = OTHER; note = uracil
  modified_base 221..223: mod_base = OTHER; note = uracil
  modified_base 229: mod_base = OTHER; note = uracil
  modified_base 240..243: mod_base = OTHER; note = uracil
  modified_base 249: mod_base = OTHER; note = uracil
  modified_base 254: mod_base = OTHER; note = uracil
  modified_base 257: mod_base = OTHER; note = uracil
  modified_base 261: mod_base = OTHER; note = uracil
  modified_base 264..265: mod_base = OTHER; note = uracil
  modified_base 275: mod_base = OTHER; note = uracil
  modified_base 284: mod_base = OTHER; note = uracil
  modified_base 286: mod_base = OTHER; note = uracil
  modified_base 297..298: mod_base = OTHER; note = uracil
  modified_base 53: mod_base = m5c
  modified_base 69: mod_base = m5c
  modified_base 156: mod_base = m5c
  modified_base 211: mod_base = m5c
  variation 150: note = CpG site, residue is C if methylated or T(=U) if unmethylated
aaattttttttttgtttgtatttttttatataaagtaatttattattgttatcggtttatttatttatcggaatttgttttgttaggatttgattttagtagattgagttatattagtattatttttgttggggtttaggtttgtatttygttttcggttttagttttattgttagttttattaggttttttggggtatattaaggaggtcgttttttttttttttttttgaattagatttttagaaataagatattaggttttttggggaaatttaattttgtttatgaatttgattat

SEQ ID NO: 388 - DNA, 300 bp, synthetic construct
  source 1..300: mol_type = other DNA
  modified_base 6: mod_base = OTHER; note = uracil
  modified_base 12: mod_base = OTHER; note = uracil
  modified_base 18: mod_base = OTHER; note = uracil
  modified_base 31..34: mod_base = OTHER; note = uracil
  modified_base 41..42: mod_base = OTHER; note = uracil
  modified_base 49: mod_base = OTHER; note = uracil
  modified_base 56: mod_base = OTHER; note = uracil
  modified_base 64: mod_base = OTHER; note = uracil
  modified_base 70: mod_base = OTHER; note = uracil
  modified_base 92..93: mod_base = OTHER; note = uracil
  modified_base 95..96: mod_base = OTHER; note = uracil
  modified_base 105..108: mod_base = OTHER; note = uracil
  modified_base 115..116: mod_base = OTHER; note = uracil
  modified_base 125: mod_base = OTHER; note = uracil
  modified_base 129: mod_base = OTHER; note = uracil
  modified_base 137: mod_base = OTHER; note = uracil
  modified_base 143: mod_base = OTHER; note = uracil
  modified_base 157: mod_base = OTHER; note = uracil
  modified_base 161..162: mod_base = OTHER; note = uracil
  modified_base 167..170: mod_base = OTHER; note = uracil
  modified_base 173: mod_base = OTHER; note = uracil
  modified_base 184: mod_base = OTHER; note = uracil
  modified_base 193: mod_base = OTHER; note = uracil
  modified_base 195: mod_base = OTHER; note = uracil
  modified_base 199: mod_base = OTHER; note = uracil
  modified_base 202: mod_base = OTHER; note = uracil
  modified_base 209: mod_base = OTHER; note = uracil
  modified_base 214..215: mod_base = OTHER; note = uracil
  modified_base 219: mod_base = OTHER; note = uracil
  modified_base 224: mod_base = OTHER; note = uracil
  modified_base 230: mod_base = OTHER; note = uracil
  modified_base 246: mod_base = OTHER; note = uracil
  modified_base 253: mod_base = OTHER; note = uracil
  modified_base 266: mod_base = OTHER; note = uracil
  modified_base 283: mod_base = OTHER; note = uracil
  modified_base 287: mod_base = OTHER; note = uracil
  modified_base 89: mod_base = m5c
  modified_base 144: mod_base = m5c
  modified_base 231: mod_base = m5c
  modified_base 247: mod_base = m5c
  variation 150: note = CpG site, residue is C if methylated or T(=U) if unmethylated
atggttaaatttatgagtaaaattagatttttttaggaagtttgatgttttgtttttggggatttaatttagaaaaagggagagaaaacggtttttttggtgtgttttagaggatttgatggagttaatagtggggttggggtcggaagygggatgtagatttgggttttaataaggatgatgttggtatgatttagtttgttgaggttaggttttggtaagataggtttcggtgagtgaatgaatcgatggtagtagtagattgttttatgtaagaaaatgtaggtaggaaaaagattt

SEQ ID NO: 389 - DNA, 300 bp, synthetic construct
  source 1..300: mol_type = other DNA
  modified_base 1: mod_base = OTHER; note = uracil
  modified_base 7..8: mod_base = OTHER; note = uracil
  modified_base 13..15: mod_base = OTHER; note = uracil
  modified_base 18..19: mod_base = OTHER; note = uracil
  modified_base 21..24: mod_base = OTHER; note = uracil
  modified_base 26: mod_base = OTHER; note = uracil
  modified_base 29: mod_base = OTHER; note = uracil
  modified_base 32..33: mod_base = OTHER; note = uracil
  modified_base 38..40: mod_base = OTHER; note = uracil
  modified_base 42..43: mod_base = OTHER; note = uracil
  modified_base 48..49: mod_base = OTHER; note = uracil
  modified_base 61..62: mod_base = OTHER; note = uracil
  modified_base 66: mod_base = OTHER; note = uracil
  modified_base 72..73: mod_base = OTHER; note = uracil
  modified_base 104..105: mod_base = OTHER; note = uracil
  modified_base 109: mod_base = OTHER; note = uracil
  modified_base 111: mod_base = OTHER; note = uracil
  modified_base 113: mod_base = OTHER; note = uracil
  modified_base 115: mod_base = OTHER; note = uracil
  modified_base 118..119: mod_base = OTHER; note = uracil
  modified_base 131: mod_base = OTHER; note = uracil
  modified_base 134..137: mod_base = OTHER; note = uracil
  modified_base 150: mod_base = OTHER; note = uracil
  modified_base 153: mod_base = OTHER; note = uracil
  modified_base 166: mod_base = OTHER; note = uracil
  modified_base 170: mod_base = OTHER; note = uracil
  modified_base 176: mod_base = OTHER; note = uracil
  modified_base 185: mod_base = OTHER; note = uracil
  modified_base 193: mod_base = OTHER; note = uracil
  modified_base 230: mod_base = OTHER; note = uracil
  modified_base 234: mod_base = OTHER; note = uracil
  modified_base 237: mod_base = OTHER; note = uracil
  modified_base 240: mod_base = OTHER; note = uracil
  modified_base 248..249: mod_base = OTHER; note = uracil
  modified_base 256: mod_base = OTHER; note = uracil
  modified_base 266: mod_base = OTHER; note = uracil
  modified_base 268: mod_base = OTHER; note = uracil
  modified_base 279: mod_base = OTHER; note = uracil
  modified_base 285: mod_base = OTHER; note = uracil
  modified_base 288: mod_base = OTHER; note = uracil
  modified_base 293..294: mod_base = OTHER; note = uracil
  modified_base 297: mod_base = OTHER; note = uracil
  modified_base 300: mod_base = OTHER; note = uracil
  modified_base 27: mod_base = m5c
  modified_base 30: mod_base = m5c
  modified_base 34: mod_base = m5c
  modified_base 36: mod_base = m5c
  modified_base 51: mod_base = m5c
  modified_base 56: mod_base = m5c
  modified_base 59: mod_base = m5c
  modified_base 69: mod_base = m5c
  modified_base 75: mod_base = m5c
  modified_base 106: mod_base = m5c
  modified_base 123: mod_base = m5c
  modified_base 138: mod_base = m5c
  modified_base 147: mod_base = m5c
  modified_base 154: mod_base = m5c
  modified_base 158: mod_base = m5c
  modified_base 171: mod_base = m5c
  modified_base 182: mod_base = m5c
  modified_base 186: mod_base = m5c
  modified_base 188: mod_base = m5c
  modified_base 194: mod_base = m5c
  modified_base 196: mod_base = m5c
  modified_base 200: mod_base = m5c
  modified_base 202: mod_base = m5c
  modified_base 220: mod_base = m5c
  modified_base 243: mod_base = m5c
  modified_base 253: mod_base = m5c
  modified_base 260: mod_base = m5c
  modified_base 281: mod_base = m5c
  variation 151: note = CpG site, residue is C if methylated or T(=U) if unmethylated
taaggtttaggttttagtttttttatcgtcgttcgcgtttttttaggtttcggagcggcgtttttttgcggtttcgaaggtggggtgggaaagtttggggagtttcggtttttatagtttgtcgtgagaattgttttcggggaattcgttygtcgtacggaaaaattggtcggagtagagtcgttcgcggtttcgcggtcgcgggtggaaggtgaaggtcgagggaggttaggttgtttttgcgtgttttgacggttggcgtgtttttttgagatgggttcgggttatttggttagtttt

SEQ ID NO: 390 - DNA, 300 bp, synthetic construct
  source 1..300: mol_type = other DNA
  modified_base 5: mod_base = OTHER; note = uracil
  modified_base 9..10: mod_base = OTHER; note = uracil
  modified_base 17..18: mod_base = OTHER; note = uracil
  modified_base 23..25: mod_base = OTHER; note = uracil
  modified_base 28: mod_base = OTHER; note = uracil
  modified_base 30: mod_base = OTHER; note = uracil
  modified_base 38: mod_base = OTHER; note = uracil
  modified_base 42..43: mod_base = OTHER; note = uracil
  modified_base 46: mod_base = OTHER; note = uracil
  modified_base 50: mod_base = OTHER; note = uracil
  modified_base 55: mod_base = OTHER; note = uracil
  modified_base 59: mod_base = OTHER; note = uracil
  modified_base 65: mod_base = OTHER; note = uracil
  modified_base 68..69: mod_base = OTHER; note = uracil
  modified_base 73..74: mod_base = OTHER; note = uracil
  modified_base 76..78: mod_base = OTHER; note = uracil
  modified_base 83..84: mod_base = OTHER; note = uracil
  modified_base 87: mod_base = OTHER; note = uracil
  modified_base 89..90: mod_base = OTHER; note = uracil
  modified_base 93..94: mod_base = OTHER; note = uracil
  modified_base 96..97: mod_base = OTHER; note = uracil
  modified_base 103: mod_base = OTHER; note = uracil
  modified_base 111: mod_base = OTHER; note = uracil
  modified_base 121: mod_base = OTHER; note = uracil
  modified_base 123: mod_base = OTHER; note = uracil
  modified_base 126: mod_base = OTHER; note = uracil
  modified_base 128: mod_base = OTHER; note = uracil
  modified_base 132..133: mod_base = OTHER; note = uracil
  modified_base 141: mod_base = OTHER; note = uracil
  modified_base 159..161: mod_base = OTHER; note = uracil
  modified_base 168: mod_base = OTHER; note = uracil
  modified_base 173: mod_base = OTHER; note = uracil
  modified_base 175: mod_base = OTHER; note = uracil
  modified_base 180: mod_base = OTHER; note = uracil
  modified_base 184: mod_base = OTHER; note = uracil
  modified_base 193: mod_base = OTHER; note = uracil
  modified_base 199: mod_base = OTHER; note = uracil
  modified_base 201..204: mod_base = OTHER; note = uracil
  modified_base 208: mod_base = OTHER; note = uracil
  modified_base 212..214: mod_base = OTHER; note = uracil
  modified_base 216..219: mod_base = OTHER; note = uracil
  modified_base 221..222: mod_base = OTHER; note = uracil
  modified_base 230: mod_base = OTHER; note = uracil
  modified_base 233: mod_base = OTHER; note = uracil
  modified_base 243: mod_base = OTHER; note = uracil
  modified_base 246: mod_base = OTHER; note = uracil
  modified_base 248: mod_base = OTHER; note = uracil
  modified_base 254..255: mod_base = OTHER; note = uracil
  modified_base 284: mod_base = OTHER; note = uracil
  modified_base 290..291: mod_base = OTHER; note = uracil
  modified_base 296..297: mod_base = OTHER; note = uracil
  modified_base 19: mod_base = m5c
  modified_base 40: mod_base = m5c
  modified_base 47: mod_base = m5c
  modified_base 57: mod_base = m5c
  modified_base 80: mod_base = m5c
  modified_base 98: mod_base = m5c
  modified_base 100: mod_base = m5c
  modified_base 104: mod_base = m5c
  modified_base 106: mod_base = m5c
  modified_base 112: mod_base = m5c
  modified_base 114: mod_base = m5c
  modified_base 118: mod_base = m5c
  modified_base 129: mod_base = m5c
  modified_base 142: mod_base = m5c
  modified_base 146: mod_base = m5c
  modified_base 153: mod_base = m5c
  modified_base 162: mod_base = m5c
  modified_base 177: mod_base = m5c
  modified_base 194: mod_base = m5c
  modified_base 225: mod_base = m5c
  modified_base 231: mod_base = m5c
  modified_base 241: mod_base = m5c
  modified_base 244: mod_base = m5c
  modified_base 249: mod_base = m5c
  modified_base 264: mod_base = m5c
  modified_base 266: mod_base = m5c
  modified_base 270: mod_base = m5c
  modified_base 273: mod_base = m5c
  variation 149: note = CpG site, residue is C if methylated or T(=U) if unmethylated
gaagttggttaagtagttcgagtttattttaagagaatacgttagtcgttaggatacgtagaagtagtttgatttttttcgatttttattttttattcgcgatcgcggaatcgcggacgattttgtttcggttagttttttcgtacggyggacgaatttttcgggggtagtttttacgataggttgtgagagtcgggattttttaaatttttttattttattttcgaggtcgtagaaaggcgtcgtttcgaggtttaggagggcgcgggcggcggtggggaggttgggatttggattttg

SEQ ID NO: 391 - DNA, 300 bp, synthetic construct
  source 1..300: mol_type = other DNA
  modified_base 1: mod_base = OTHER; note = uracil
  modified_base 10..11: mod_base = OTHER; note = uracil
  modified_base 15..16: mod_base = OTHER; note = uracil
  modified_base 18: mod_base = OTHER; note = uracil
  modified_base 21: mod_base = OTHER; note = uracil
  modified_base 25: mod_base = OTHER; note = uracil
  modified_base 33: mod_base = OTHER; note = uracil
  modified_base 43: mod_base = OTHER; note = uracil
  modified_base 60: mod_base = OTHER; note = uracil
  modified_base 63: mod_base = OTHER; note = uracil
  modified_base 65..66: mod_base = OTHER; note = uracil
  modified_base 68: mod_base = OTHER; note = uracil
  modified_base 76..78: mod_base = OTHER; note = uracil
  modified_base 82..83: mod_base = OTHER; note = uracil
  modified_base 86..87: mod_base = OTHER; note = uracil
  modified_base 90..91: mod_base = OTHER; note = uracil
  modified_base 95: mod_base = OTHER; note = uracil
  modified_base 108..109: mod_base = OTHER; note = uracil
  modified_base 114..116: mod_base = OTHER; note = uracil
  modified_base 118: mod_base = OTHER; note = uracil
  modified_base 123..124: mod_base = OTHER; note = uracil
  modified_base 129: mod_base = OTHER; note = uracil
  modified_base 144: mod_base = OTHER; note = uracil
  modified_base 147..148: mod_base = OTHER; note = uracil
  modified_base 150: mod_base = OTHER; note = uracil
  modified_base 166..167: mod_base = OTHER; note = uracil
  modified_base 172: mod_base = OTHER; note = uracil
  modified_base 174: mod_base = OTHER; note = uracil
  modified_base 177..178: mod_base = OTHER; note = uracil
  modified_base 182: mod_base = OTHER; note = uracil
  modified_base 190: mod_base = OTHER; note = uracil
  modified_base 193: mod_base = OTHER; note = uracil
  modified_base 195..196: mod_base = OTHER; note = uracil
  modified_base 214: mod_base = OTHER; note = uracil
  modified_base 220: mod_base = OTHER; note = uracil
  modified_base 226: mod_base = OTHER; note = uracil
  modified_base 232: mod_base = OTHER; note = uracil
  modified_base 235: mod_base = OTHER; note = uracil
  modified_base 243: mod_base = OTHER; note = uracil
  modified_base 249: mod_base = OTHER; note = uracil
  modified_base 253: mod_base = OTHER; note = uracil
  modified_base 259: mod_base = OTHER; note = uracil
  modified_base 264: mod_base = OTHER; note = uracil
  modified_base 268: mod_base = OTHER; note = uracil
  modified_base 271: mod_base = OTHER; note = uracil
  modified_base 280: mod_base = OTHER; note = uracil
  modified_base 284: mod_base = OTHER; note = uracil
  modified_base 291..293: mod_base = OTHER; note = uracil
  modified_base 298: mod_base = OTHER; note = uracil
  modified_base 2: mod_base = m5c
  modified_base 58: mod_base = m5c
  modified_base 110: mod_base = m5c
  modified_base 130: mod_base = m5c
  modified_base 175: mod_base = m5c
  modified_base 215: mod_base = m5c
  modified_base 218: mod_base = m5c
  modified_base 223: mod_base = m5c
  modified_base 228: mod_base = m5c
  modified_base 233: mod_base = m5c
  modified_base 250: mod_base = m5c
  modified_base 287: mod_base = m5c
  variation 151: note = CpG site, residue is C if methylated or T(=U) if unmethylated
tcgagggagttaggttatagttgataggaaggtagaaggtggtaggaggggaggttgcgttgtatttttgggttgtttaggttaatttgttaggtaggagggggaagttcgtgtttattttattatgatcgggaagatgatggtagttatygtggatttgaggatttagagtatcgttaggtagaggatttgtattagggtgaagaggtggattcggcgtagcggtacgtgtcgtaggaaggtatggttcggttggtgtttggttggtattaggaagagtttgtagcgtttttagaatta

SEQ ID NO: 392 - DNA, 300 bp, synthetic construct
  source 1..300: mol_type = other DNA
  modified_base 6: mod_base = OTHER; note = uracil
  modified_base 15: mod_base = OTHER; note = uracil
  modified_base 18: mod_base = OTHER; note = uracil
  modified_base 22: mod_base = OTHER; note = uracil
  modified_base 24: mod_base = OTHER; note = uracil
  modified_base 27..28: mod_base = OTHER; note = uracil
  modified_base 34..35: mod_base = OTHER; note = uracil
  modified_base 38..39: mod_base = OTHER; note = uracil
  modified_base 43: mod_base = OTHER; note = uracil
  modified_base 45..46: mod_base = OTHER; note = uracil
  modified_base 49: mod_base = OTHER; note = uracil
  modified_base 54..55: mod_base = OTHER; note = uracil
  modified_base 59..60: mod_base = OTHER; note = uracil
  modified_base 63..64: mod_base = OTHER; note = uracil
  modified_base 70: mod_base = OTHER; note = uracil
  modified_base 76: mod_base = OTHER; note = uracil
  modified_base 79: mod_base = OTHER; note = uracil
  modified_base 84: mod_base = OTHER; note = uracil
  modified_base 90..91: mod_base = OTHER; note = uracil
  modified_base 93..94: mod_base = OTHER; note = uracil
  modified_base 96: mod_base = OTHER; note = uracil
  modified_base 99: mod_base = OTHER; note = uracil
  modified_base 101..103: mod_base = OTHER; note = uracil
  modified_base 109: mod_base = OTHER; note = uracil
  modified_base 114..115: mod_base = OTHER; note = uracil
  modified_base 117: mod_base = OTHER; note = uracil
  modified_base 120..121: mod_base = OTHER; note = uracil
  modified_base 130: mod_base = OTHER; note = uracil
  modified_base 132: mod_base = OTHER; note = uracil
  modified_base 138..139: mod_base = OTHER; note = uracil
  modified_base 141: mod_base = OTHER; note = uracil
  modified_base 146..147: mod_base = OTHER; note = uracil
  modified_base 155: mod_base = OTHER; note = uracil
  modified_base 158..159: mod_base = OTHER; note = uracil
  modified_base 162: mod_base = OTHER; note = uracil
  modified_base 165: mod_base = OTHER; note = uracil
  modified_base 168..169: mod_base = OTHER; note = uracil
  modified_base 174: mod_base = OTHER; note = uracil
  modified_base 188: mod_base = OTHER; note = uracil
  modified_base 194: mod_base = OTHER; note = uracil
  modified_base 197..201: mod_base = OTHER; note = uracil
  modified_base 203..204: mod_base = OTHER; note = uracil
  modified_base 207..208: mod_base = OTHER; note = uracil
  modified_base 212: mod_base = OTHER; note = uracil
  modified_base 220..221: mod_base = OTHER; note = uracil
  modified_base 226: mod_base = OTHER; note = uracil
  modified_base 229..231: mod_base = OTHER; note = uracil
  modified_base 239: mod_base = OTHER; note = uracil
  modified_base 244: mod_base = OTHER; note = uracil
  modified_base 247..248: mod_base = OTHER; note = uracil
  modified_base 250..253: mod_base = OTHER; note = uracil
  modified_base 255..256: mod_base = OTHER; note = uracil
  modified_base 259..260: mod_base = OTHER; note = uracil
  modified_base 262..263: mod_base = OTHER; note = uracil
  modified_base 266: mod_base = OTHER; note = uracil
  modified_base 269..270: mod_base = OTHER; note = uracil
  modified_base 273..274: mod_base = OTHER; note = uracil
  modified_base 278: mod_base = OTHER; note = uracil
  modified_base 281: mod_base = OTHER; note = uracil
  modified_base 287..288: mod_base = OTHER; note = uracil
  modified_base 292: mod_base = OTHER; note = uracil
  modified_base 294..296: mod_base = OTHER; note = uracil
  modified_base 13: mod_base = m5c
  modified_base 50: mod_base = m5c
  modified_base 67: mod_base = m5c
  modified_base 72: mod_base = m5c
  modified_base 77: mod_base = m5c
  modified_base 82: mod_base = m5c
  modified_base 85: mod_base = m5c
  modified_base 125: mod_base = m5c
  modified_base 170: mod_base = m5c
  modified_base 190: mod_base = m5c
  modified_base 242: mod_base = m5c
  modified_base 298: mod_base = m5c
  variation 149: note = CpG site, residue is C if methylated or T(=U) if unmethylated
tagttttgggaacgttgtaagttttttttgatgttagttaagtattagtcggattatgtttttttgcggtacgtgtcgttgcgtcggatttatttttttattttggtgtagattttttgtttggcggtgttttggatttttaaatttayggtggttgttattattttttcggttatggtaaagtgggtacgggttttttttttttgtttggtaggttggtttgggtaatttagaggtgtagcgtaatttttttttttgttattttttgtttttttgttagttgtggtttggttttttcgg

SEQ ID NO: 393 - DNA, 300 bp, synthetic construct
  source 1..300: mol_type = other DNA
  modified_base 7..8: mod_base = OTHER; note = uracil
  modified_base 27..28: mod_base = OTHER; note = uracil
  modified_base 35..37: mod_base = OTHER; note = uracil
  modified_base 40: mod_base = OTHER; note = uracil
  modified_base 43: mod_base = OTHER; note = uracil
  modified_base 45: mod_base = OTHER; note = uracil
  modified_base 52: mod_base = OTHER; note = uracil
  modified_base 58: mod_base = OTHER; note = uracil
  modified_base 66: mod_base = OTHER; note = uracil
  modified_base 69: mod_base = OTHER; note = uracil
  modified_base 75..76: mod_base = OTHER; note = uracil
  modified_base 84: mod_base = OTHER; note = uracil
  modified_base 89: mod_base = OTHER; note = uracil
  modified_base 115: mod_base = OTHER; note = uracil
  modified_base 117..119: mod_base = OTHER; note = uracil
  modified_base 122: mod_base = OTHER; note = uracil
  modified_base 128: mod_base = OTHER; note = uracil
  modified_base 132: mod_base = OTHER; note = uracil
  modified_base 136: mod_base = OTHER; note = uracil
  modified_base 144..145: mod_base = OTHER; note = uracil
  modified_base 148: mod_base = OTHER; note = uracil
  modified_base 154..157: mod_base = OTHER; note = uracil
  modified_base 164..165: mod_base = OTHER; note = uracil
  modified_base 167: mod_base = OTHER; note = uracil
  modified_base 173..174: mod_base = OTHER; note = uracil
  modified_base 183: mod_base = OTHER; note = uracil
  modified_base 186: mod_base = OTHER; note = uracil
  modified_base 189: mod_base = OTHER; note = uracil
  modified_base 201..202: mod_base = OTHER; note = uracil
  modified_base 206: mod_base = OTHER; note = uracil
  modified_base 211: mod_base = OTHER; note = uracil
  modified_base 219..220: mod_base = OTHER; note = uracil
  modified_base 229: mod_base = OTHER; note = uracil
  modified_base 232: mod_base = OTHER; note = uracil
  modified_base 237: mod_base = OTHER; note = uracil
  modified_base 240: mod_base = OTHER; note = uracil
  modified_base 242..244: mod_base = OTHER; note = uracil
  modified_base 246..247: mod_base = OTHER; note = uracil
  modified_base 253..254: mod_base = OTHER; note = uracil
  modified_base 258..260: mod_base = OTHER; note = uracil
  modified_base 263..265: mod_base = OTHER; note = uracil
  modified_base 268: mod_base = OTHER; note = uracil
  modified_base 270: mod_base = OTHER; note = uracil
  modified_base 274: mod_base = OTHER; note = uracil
  modified_base 278: mod_base = OTHER; note = uracil
  modified_base 288..289: mod_base = OTHER; note = uracil
  modified_base 299: mod_base = OTHER; note = uracil
  modified_base 9: mod_base = m5c
  modified_base 13: mod_base = m5c
  modified_base 53: mod_base = m5c
  modified_base 67: mod_base = m5c
  modified_base 77: mod_base = m5c
  modified_base 207: mod_base = m5c
  variation 151: note = CpG site, residue is C if methylated or T(=U) if unmethylated
aaattattcgggcgtggtggtgggtgtttgtaattttagttatttaggaggtcgaggtaggagaatcgtttgaattcgggaggtagagtataggttgttggagggttgaaggtgtatttagtagagattggtatataggaggttttgtaayggttttaggaaatttttgggtttagtaagagttttagtaggaggtagaattatatcgggtaggagtgtttggaaaggttttaaggtaattttttttaaagttttggtttaattttatattgttaggttgttaaaggttatttaaaagtt

SEQ ID NO: 394 - DNA, 300 bp, synthetic construct
  source 1..300: mol_type = other DNA
  modified_base 3: mod_base = OTHER; note = uracil
  modified_base 14..15: mod_base = OTHER; note = uracil
  modified_base 21: mod_base = OTHER; note = uracil
  modified_base 24..25: mod_base = OTHER; note = uracil
  modified_base 29: mod_base = OTHER; note = uracil
  modified_base 44..45: mod_base = OTHER; note = uracil
  modified_base 50: mod_base = OTHER; note = uracil
  modified_base 65..66: mod_base = OTHER; note = uracil
  modified_base 73..74: mod_base = OTHER; note = uracil
  modified_base 78..79: mod_base = OTHER; note = uracil
  modified_base 83: mod_base = OTHER; note = uracil
  modified_base 85: mod_base = OTHER; note = uracil
  modified_base 87..88: mod_base = OTHER; note = uracil
  modified_base 91..92: mod_base = OTHER; note = uracil
  modified_base 103: mod_base = OTHER; note = uracil
  modified_base 106..107: mod_base = OTHER; note = uracil
  modified_base 109..110: mod_base = OTHER; note = uracil
  modified_base 113: mod_base = OTHER; note = uracil
  modified_base 119: mod_base = OTHER; note = uracil
  modified_base 121: mod_base = OTHER; note = uracil
  modified_base 125: mod_base = OTHER; note = uracil
  modified_base 130..132: mod_base = OTHER; note = uracil
  modified_base 141..142: mod_base = OTHER; note = uracil
  modified_base 148: mod_base = OTHER; note = uracil
  modified_base 154: mod_base = OTHER; note = uracil
  modified_base 159..160: mod_base = OTHER; note = uracil
  modified_base 162..163: mod_base = OTHER; note = uracil
  modified_base 170..171: mod_base = OTHER; note = uracil
  modified_base 175: mod_base = OTHER; note = uracil
  modified_base 177: mod_base = OTHER; note = uracil
  modified_base 180: mod_base = OTHER; note = uracil
  modified_base 187: mod_base = OTHER; note = uracil
  modified_base 189..190: mod_base = OTHER; note = uracil
  modified_base 193: mod_base = OTHER; note = uracil
  modified_base 196..198: mod_base = OTHER; note = uracil
  modified_base 200..201: mod_base = OTHER; note = uracil
  modified_base 204: mod_base = OTHER; note = uracil
  modified_base 207..208: mod_base = OTHER; note = uracil
  modified_base 213: mod_base = OTHER; note = uracil
  modified_base 215: mod_base = OTHER; note = uracil
  modified_base 218..219: mod_base = OTHER; note = uracil
  modified_base 221..222: mod_base = OTHER; note = uracil
  modified_base 229: mod_base = OTHER; note = uracil
  modified_base 238: mod_base = OTHER; note = uracil
  modified_base 240..241: mod_base = OTHER; note = uracil
  modified_base 244..245: mod_base = OTHER; note = uracil
  modified_base 250..251: mod_base = OTHER; note = uracil
  modified_base 253..254: mod_base = OTHER; note = uracil
  modified_base 262: mod_base = OTHER; note = uracil
  modified_base 271: mod_base = OTHER; note = uracil
  modified_base 275: mod_base = OTHER; note = uracil
  modified_base 277..279: mod_base = OTHER; note = uracil
  modified_base 281..282: mod_base = OTHER; note = uracil
  modified_base 284..285: mod_base = OTHER; note = uracil
  modified_base 289..290: mod_base = OTHER; note = uracil
  modified_base 93: mod_base = m5c
  modified_base 223: mod_base = m5c
  modified_base 233: mod_base = m5c
  modified_base 247: mod_base = m5c
  modified_base 287: mod_base = m5c
  modified_base 291: mod_base = m5c
  variation 149: note = CpG site, residue is C if methylated or T(=U) if unmethylated
agtttttaaatggtttttaatagtttgatagtgtagggttgggttaggattttggagggagttgttttgaagtttttttaggtatttttgttcggtatggttttattttttgttgaagtttttattggatttagaggttttttggggtygttgtaggattttttgtatgttagtttttgttgggtgtatttttaattttttaataatttatgttttgtttttcgggtttaagcggtttttttgtttcggttttttgagtagttgggattataggtatttattattacgttcgggtaattt

SEQ ID NO: 395 - DNA, 300 bp, synthetic construct
  source 1..300: mol_type = other DNA
  modified_base 10: mod_base = OTHER; note = uracil
  modified_base 13: mod_base = OTHER; note = uracil
  modified_base 16..18: mod_base = OTHER; note = uracil
  modified_base 29..30: mod_base = OTHER; note = uracil
  modified_base 32..34: mod_base = OTHER; note = uracil
  modified_base 40: mod_base = OTHER; note = uracil
  modified_base 43: mod_base = OTHER; note = uracil
  modified_base 52: mod_base = OTHER; note = uracil
  modified_base 55: mod_base = OTHER; note = uracil
  modified_base 74: mod_base = OTHER; note = uracil
  modified_base 81: mod_base = OTHER; note = uracil
  modified_base 83: mod_base = OTHER; note = uracil
  modified_base 86: mod_base = OTHER; note = uracil
  modified_base 89..90: mod_base = OTHER; note = uracil
  modified_base 93: mod_base = OTHER; note = uracil
  modified_base 95: mod_base = OTHER; note = uracil
  modified_base 100: mod_base = OTHER; note = uracil
  modified_base 112: mod_base = OTHER; note = uracil
  modified_base 126: mod_base = OTHER; note = uracil
  modified_base 128..129: mod_base = OTHER; note = uracil
  modified_base 135: mod_base = OTHER; note = uracil
  modified_base 151: mod_base = OTHER; note = uracil
  modified_base 153: mod_base = OTHER; note = uracil
  modified_base 156: mod_base = OTHER; note = uracil
  modified_base 158: mod_base = OTHER; note = uracil
  modified_base 161: mod_base = OTHER; note = uracil
  modified_base 166: mod_base = OTHER; note = uracil
  modified_base 168: mod_base = OTHER; note = uracil
  modified_base 170: mod_base = OTHER; note = uracil
  modified_base 174..175: mod_base = OTHER; note = uracil
  modified_base 177: mod_base = OTHER; note = uracil
  modified_base 182..183: mod_base = OTHER; note = uracil
  modified_base 192: mod_base = OTHER; note = uracil
  modified_base 196: mod_base = OTHER; note = uracil
  modified_base 198..199: mod_base = OTHER; note = uracil
  modified_base 207: mod_base = OTHER; note = uracil
  modified_base 211: mod_base = OTHER; note = uracil
  modified_base 216..218: mod_base = OTHER; note = uracil
  modified_base 225..226: mod_base = OTHER; note = uracil
  modified_base 230..232: mod_base = OTHER; note = uracil
  modified_base 234..236: mod_base = OTHER; note = uracil
  modified_base 239: mod_base = OTHER; note = uracil
  modified_base 248: mod_base = OTHER; note = uracil
  modified_base 259: mod_base = OTHER; note = uracil
  modified_base 264..265: mod_base = OTHER; note = uracil
  modified_base 268: mod_base = OTHER; note = uracil
  modified_base 270..272: mod_base = OTHER; note = uracil
  modified_base 275: mod_base = OTHER; note = uracil
  modified_base 278: mod_base = OTHER; note = uracil
  modified_base 280: mod_base = OTHER; note = uracil
  modified_base 282..283: mod_base = OTHER; note = uracil
  modified_base 287..288: mod_base = OTHER; note = uracil
  modified_base 290: mod_base = OTHER; note = uracil
  modified_base 25: mod_base = m5c
  modified_base 50: mod_base = m5c
  modified_base 97: mod_base = m5c
  modified_base 101: mod_base = m5c
  modified_base 106: mod_base = m5c
  modified_base 113: mod_base = m5c
  modified_base 146: mod_base = m5c
  modified_base 159: mod_base = m5c
  modified_base 162: mod_base = m5c
  modified_base 200: mod_base = m5c
  modified_base 222: mod_base = m5c
  variation 138: note = CpG site, residue is C if methylated or T(=U) if unmethylated
  variation 164: note = CpG site, residue is C if methylated or T(=U) if unmethylated
aggaaaaaatagtagtttaagaatcgggtttttttgttatagtaggagtcgtatttatttatatatgttatgttttattgtttagtaattagttttcggtcggggcgtgggtcgggaagaggggttttttggtgtagygggttggcgtgatttattatcgtcgygtattttggtttttgggtttaggttaatagattttcgggttttaggttgggtttaggcggttaggttttttttgttgaggaatttgggttggggtagtgttagttttttgttttttatttggttatagaaggggta

SEQ ID NO: 396 - DNA, 300 bp, synthetic construct
  source 1..300: mol_type = other DNA
  modified_base 3..6: mod_base = OTHER; note = uracil
  modified_base 9: mod_base = OTHER; note = uracil
  modified_base 15..16: mod_base = OTHER; note = uracil
  modified_base 27: mod_base = OTHER; note = uracil
  modified_base 34: mod_base = OTHER; note = uracil
  modified_base 38: mod_base = OTHER; note = uracil
  modified_base 40: mod_base = OTHER; note = uracil
  modified_base 43..46: mod_base = OTHER; note = uracil
  modified_base 49..51: mod_base = OTHER; note = uracil
  modified_base 57..58: mod_base = OTHER; note = uracil
  modified_base 60: mod_base = OTHER; note = uracil
  modified_base 63: mod_base = OTHER; note = uracil
  modified_base 72..73: mod_base = OTHER; note = uracil
  modified_base 77: mod_base = OTHER; note = uracil
  modified_base 80..81: mod_base = OTHER; note = uracil
  modified_base 86..88: mod_base = OTHER; note = uracil
  modified_base 91..92: mod_base = OTHER; note = uracil
  modified_base 98..99: mod_base = OTHER; note = uracil
  modified_base 107: mod_base = OTHER; note = uracil
  modified_base 114..115: mod_base = OTHER; note = uracil
  modified_base 120..122: mod_base = OTHER; note = uracil
  modified_base 128..129: mod_base = OTHER; note = uracil
  modified_base 152: mod_base = OTHER; note = uracil
  modified_base 156..157: mod_base = OTHER; note = uracil
  modified_base 160..161: mod_base = OTHER; note = uracil
  modified_base 164: mod_base = OTHER; note = uracil
  modified_base 167: mod_base = OTHER; note = uracil
  modified_base 169..170: mod_base = OTHER; note = uracil
  modified_base 177..180: mod_base = OTHER; note = uracil
  modified_base 182: mod_base = OTHER; note = uracil
  modified_base 185..186: mod_base = OTHER; note = uracil
  modified_base 190..192: mod_base = OTHER; note = uracil
  modified_base 196..198: mod_base = OTHER; note = uracil
  modified_base 202: mod_base = OTHER; note = uracil
  modified_base 209: mod_base = OTHER; note = uracil
  modified_base 216: mod_base = OTHER; note = uracil
  modified_base 221: mod_base = OTHER; note = uracil
  modified_base 229: mod_base = OTHER; note = uracil
  modified_base 234: mod_base = OTHER; note = uracil
  modified_base 253: mod_base = OTHER; note = uracil
  modified_base 255..256: mod_base = OTHER; note = uracil
  modified_base 259: mod_base = OTHER; note = uracil
  modified_base 265: mod_base = OTHER; note = uracil
  modified_base 273..274: mod_base = OTHER; note = uracil
  modified_base 280: mod_base = OTHER; note = uracil
  modified_base 286: mod_base = OTHER; note = uracil
  modified_base 289: mod_base = OTHER; note = uracil
  modified_base 298..299: mod_base = OTHER; note = uracil
  modified_base 78: mod_base = m5c
  modified_base 100: mod_base = m5c
  modified_base 138: mod_base = m5c
  modified_base 141: mod_base = m5c
  modified_base 154: mod_base = m5c
  modified_base 187: mod_base = m5c
  modified_base 194: mod_base = m5c
  modified_base 199: mod_base = m5c
  modified_base 203: mod_base = m5c
  modified_base 250: mod_base = m5c
  modified_base 275: mod_base = m5c
  variation 136: note = CpG site, residue is C if methylated or T(=U) if unmethylated
  variation 162: note = CpG site, residue is C if methylated or T(=U) if unmethylated
tattttttttgtggttaggtgagaagtagggagttggtattgttttaatttagattttttagtagggagggtttggtcgtttgggtttagtttgaaattcgggagtttgttaatttaggtttagaggttagagtgygcggcggtgatgagttacgttaattygttgtattaggagattttttttttcggtttacgtttcggtcgagagttggttgttgagtaataagatataatatatataaatagatgcgatttttgttgtaatagggaggttcgatttttgggttgttgttttttttt

SEQ ID NO: 397 - DNA, 300 bp, synthetic construct
  source 1..300: mol_type = other DNA
  modified_base 2..4: mod_base = OTHER; note = uracil
  modified_base 12: mod_base = OTHER; note = uracil
  modified_base 39: mod_base = OTHER; note = uracil
  modified_base 41: mod_base = OTHER; note = uracil
  modified_base 47..49: mod_base = OTHER; note = uracil
  modified_base 53: mod_base = OTHER; note = uracil
  modified_base 61: mod_base = OTHER; note = uracil
  modified_base 69: mod_base = OTHER; note = uracil
  modified_base 73: mod_base = OTHER; note = uracil
  modified_base 77..78: mod_base = OTHER; note = uracil
  modified_base 82: mod_base = OTHER; note = uracil
  modified_base 85: mod_base = OTHER; note = uracil
  modified_base 89: mod_base = OTHER; note = uracil
  modified_base 91: mod_base = OTHER; note = uracil
  modified_base 94..97: mod_base = OTHER; note = uracil
  modified_base 104: mod_base = OTHER; note = uracil
  modified_base 108..109: mod_base = OTHER; note = uracil
  modified_base 113: mod_base = OTHER; note = uracil
  modified_base 115..116: mod_base = OTHER; note = uracil
  modified_base 119..120: mod_base = OTHER; note = uracil
  modified_base 122: mod_base = OTHER; note = uracil
  modified_base 125..126: mod_base = OTHER; note = uracil
  modified_base 128: mod_base = OTHER; note = uracil
  modified_base 137: mod_base = OTHER; note = uracil
  modified_base 143: mod_base = OTHER; note = uracil
  modified_base 146: mod_base = OTHER; note = uracil
  modified_base 152..153: mod_base = OTHER; note = uracil
  modified_base 156..157: mod_base = OTHER; note = uracil
  modified_base 159..160: mod_base = OTHER; note = uracil
  modified_base 162: mod_base = OTHER; note = uracil
  modified_base 164..165: mod_base = OTHER; note = uracil
  modified_base 169..170: mod_base = OTHER; note = uracil
  modified_base 203: mod_base = OTHER; note = uracil
  modified_base 205: mod_base = OTHER; note = uracil
  modified_base 214..215: mod_base = OTHER; note = uracil
  modified_base 224: mod_base = OTHER; note = uracil
  modified_base 230: mod_base = OTHER; note = uracil
  modified_base 232..233: mod_base = OTHER; note = uracil
  modified_base 237..238: mod_base = OTHER; note = uracil
  modified_base 246..247: mod_base = OTHER; note = uracil
  modified_base 249..251: mod_base = OTHER; note = uracil
  modified_base 253..254: mod_base = OTHER; note = uracil
  modified_base 256: mod_base = OTHER; note = uracil
  modified_base 259..260: mod_base = OTHER; note = uracil
  modified_base 262: mod_base = OTHER; note = uracil
  modified_base 264: mod_base = OTHER; note = uracil
  modified_base 271: mod_base = OTHER; note = uracil
  modified_base 280: mod_base = OTHER; note = uracil
  modified_base 284: mod_base = OTHER; note = uracil
  modified_base 290..291: mod_base = OTHER; note = uracil
  modified_base 293: mod_base = OTHER; note = uracil
  modified_base 298..300: mod_base = OTHER; note = uracil
  modified_base 33: mod_base = m5c
  modified_base 36: mod_base = m5c
  modified_base 45: mod_base = m5c
  modified_base 67: mod_base = m5c
  modified_base 75: mod_base = m5c
  modified_base 92: mod_base = m5c
  modified_base 98: mod_base = m5c
  modified_base 166: mod_base = m5c
  modified_base 195: mod_base = m5c
  modified_base 206: mod_base = m5c
  modified_base 226: mod_base = m5c
  modified_base 240: mod_base = m5c
  modified_base 296: mod_base = m5c
  variation 150: note = CpG site, residue is C if methylated or T(=U) if unmethylated
atttaggaatttttttttttttttttttgagacggcgtttttgtcgtttaggttggagtgtagtggcgtagtttcgtttaattgtaagtttcgttttcgggtttatgttatttttttgttttagttttttgagtagttggaattataggygtttgttattatattcggttaattttttgtatttttagtagagacggggttttatcgtgttagttaggatggtttcgattttttgatttcgtgatttatttattttagttttttaaagtgttgggattataggtttgaattattgcgttt

SEQ ID NO: 398 - DNA, 300 bp, synthetic construct
  source 1..300: mol_type = other DNA
  modified_base 6: mod_base = OTHER; note = uracil
  modified_base 14: mod_base = OTHER; note = uracil
  modified_base 18..19: mod_base = OTHER; note = uracil
  modified_base 26..28: mod_base = OTHER; note = uracil
  modified_base 31: mod_base = OTHER; note = uracil
  modified_base 33: mod_base = OTHER; note = uracil
  modified_base 43: mod_base = OTHER; note = uracil
  modified_base 58: mod_base = OTHER; note = uracil
  modified_base 66: mod_base = OTHER; note = uracil
  modified_base 79..80: mod_base = OTHER; note = uracil
  modified_base 83..84: mod_base = OTHER; note = uracil
  modified_base 88: mod_base = OTHER; note = uracil
  modified_base 92: mod_base = OTHER; note = uracil
  modified_base 102..104: mod_base = OTHER; note = uracil
  modified_base 108: mod_base = OTHER; note = uracil
  modified_base 110: mod_base = OTHER; note = uracil
  modified_base 113: mod_base = OTHER; note = uracil
  modified_base 122: mod_base = OTHER; note = uracil
  modified_base 133: mod_base = OTHER; note = uracil
  modified_base 146: mod_base = OTHER; note = uracil
  modified_base 152..153: mod_base = OTHER; note = uracil
  modified_base 161..162: mod_base = OTHER; note = uracil
  modified_base 165: mod_base = OTHER; note = uracil
  modified_base 168: mod_base = OTHER; note = uracil
  modified_base 170: mod_base = OTHER; note = uracil
  modified_base 177: mod_base = OTHER; note = uracil
  modified_base 183: mod_base = OTHER; note = uracil
  modified_base 194: mod_base = OTHER; note = uracil
  modified_base 200..201: mod_base = OTHER; note = uracil
  modified_base 213: mod_base = OTHER; note = uracil
  modified_base 217: mod_base = OTHER; note = uracil
  modified_base 230: mod_base = OTHER; note = uracil
  modified_base 235..236: mod_base = OTHER; note = uracil
  modified_base 238: mod_base = OTHER; note = uracil
  modified_base 241: mod_base = OTHER; note = uracil
  modified_base 243: mod_base = OTHER; note = uracil
  modified_base 245..246: mod_base = OTHER; note = uracil
  modified_base 249..250: mod_base = OTHER; note = uracil
  modified_base 258: mod_base = OTHER; note = uracil
  modified_base 266: mod_base = OTHER; note = uracil
  modified_base 270: mod_base = OTHER; note = uracil
  modified_base 272: mod_base = OTHER; note = uracil
  modified_base 294..295: mod_base = OTHER; note = uracil
  modified_base 4: mod_base = m5c
  modified_base 60: mod_base = m5c
  modified_base 74: mod_base = m5c
  modified_base 94: mod_base = m5c
  modified_base 105: mod_base = m5c
  modified_base 134: mod_base = m5c
  modified_base 202: mod_base = m5c
  modified_base 208: mod_base = m5c
  modified_base 225: mod_base = m5c
  modified_base 233: mod_base = m5c
  modified_base 255: mod_base = m5c
  modified_base 264: mod_base = m5c
  modified_base 267: mod_base = m5c
  variation 150: note = CpG site, residue is C if methylated or T(=U) if unmethylated
gggcgtagtggtttaagtttgtaattttagtattttgagaggttgaggtgggtggattacgaggttaggagatcgagattattttggttaatacggtgaaatttcgtttttattaaaaatataaaaaattggtcgggtgtggtggtaggygtttgtagttttagttatttaagaggttgaggtaggagaatggtatgaattcgggggcggagtttgtagttaggcgagattgcgttattgtattttagtttgggcgatagagacgtcgttttaaaaaaaaaaaaaaaagaatttttgggt

SEQ ID NO: 399 - DNA, 300 bp, synthetic construct
  source 1..300: mol_type = other DNA
  modified_base 6: mod_base = OTHER; note = uracil
  modified_base 9: mod_base = OTHER; note = uracil
  modified_base 21..22: mod_base = OTHER; note = uracil
  modified_base 24: mod_base = OTHER; note = uracil
  modified_base 30..31: mod_base = OTHER; note = uracil
  modified_base 39: mod_base = OTHER; note = uracil
  modified_base 44..46: mod_base = OTHER; note = uracil
  modified_base 49..53: mod_base = OTHER; note = uracil
  modified_base 58..59: mod_base = OTHER; note = uracil
  modified_base 61: mod_base = OTHER; note = uracil
  modified_base 63: mod_base = OTHER; note = uracil
  modified_base 66: mod_base = OTHER; note = uracil
  modified_base 69: mod_base = OTHER; note = uracil
  modified_base 72: mod_base = OTHER; note = uracil
  modified_base 78..79: mod_base = OTHER; note = uracil
  modified_base 94: mod_base = OTHER; note = uracil
  modified_base 97: mod_base = OTHER; note = uracil
  modified_base 102: mod_base = OTHER; note = uracil
  modified_base 108: mod_base = OTHER; note = uracil
  modified_base 118..120: mod_base = OTHER; note = uracil
  modified_base 123: mod_base = OTHER; note = uracil
  modified_base 125: mod_base = OTHER; note = uracil
  modified_base 129..130: mod_base = OTHER; note = uracil
  modified_base 138: mod_base = OTHER; note = uracil
  modified_base 140: mod_base = OTHER; note = uracil
  modified_base 144..145: mod_base = OTHER; note = uracil
  modified_base 148..149: mod_base = OTHER; note = uracil
  modified_base 153..154: mod_base = OTHER; note = uracil
  modified_base 157: mod_base = OTHER; note = uracil
  modified_base 176: mod_base = OTHER; note = uracil
  modified_base 180: mod_base = OTHER; note = uracil
  modified_base 183: mod_base = OTHER; note = uracil
  modified_base 192..193: mod_base = OTHER; note = uracil
  modified_base 197: mod_base = OTHER; note = uracil
  modified_base 199: mod_base = OTHER; note = uracil
  modified_base 201: mod_base = OTHER; note = uracil
  modified_base 204..207: mod_base = OTHER; note = uracil
  modified_base 211: mod_base = OTHER; note = uracil
  modified_base 216..217: mod_base = OTHER; note = uracil
  modified_base 223..224: mod_base = OTHER; note = uracil
  modified_base 229: mod_base = OTHER; note = uracil
  modified_base 231: mod_base = OTHER; note = uracil
  modified_base 235..236: mod_base = OTHER; note = uracil
  modified_base 244: mod_base = OTHER; note = uracil
  modified_base 246: mod_base = OTHER; note = uracil
  modified_base 259: mod_base = OTHER; note = uracil
  modified_base 265: mod_base = OTHER; note = uracil
  modified_base 267: mod_base = OTHER; note = uracil
  modified_base 275..276: mod_base = OTHER; note = uracil
  modified_base 280: mod_base = OTHER; note = uracil
  modified_base 292..293: mod_base = OTHER; note = uracil
  modified_base 40: mod_base = m5c
  modified_base 73: mod_base = m5c
  modified_base 90: mod_base = m5c
  modified_base 109: mod_base = m5c
  modified_base 126: mod_base = m5c
  modified_base 184: mod_base = m5c
  variation 151: note = CpG site, residue is C if methylated or T(=U) if unmethylated
aaatatagtaggagagaatttttttgagatttaagatatcgtgttttttttttttggttttttagttgttgtcgagttttggagaaaatcgggtatttgaatagaggtcgtgtttgtttttgtttcggttttgtgtttttatttttgttaygttattatggataatgaaagttgattggttgtcggggttttttttttttttgtttttgttatttttatttgttaggttttatgttttttttgtatagagttgttgtgtttgggttttaatttgttaggtagtgataaattttaagaaaa

SEQ ID NO: 400 - DNA, 300 bp, synthetic construct
  source 1..300: mol_type = other DNA
  modified_base 5: mod_base = OTHER; note = uracil
  modified_base 17: mod_base = OTHER; note = uracil
  modified_base 19: mod_base = OTHER; note = uracil
  modified_base 22..23: mod_base = OTHER; note = uracil
  modified_base 27: mod_base = OTHER; note = uracil
  modified_base 37..39: mod_base = OTHER; note = uracil
  modified_base 43: mod_base = OTHER; note = uracil
  modified_base 45: mod_base = OTHER; note = uracil
  modified_base 48: mod_base = OTHER; note = uracil
  modified_base 51: mod_base = OTHER; note = uracil
  modified_base 53: mod_base = OTHER; note = uracil
  modified_base 58: mod_base = OTHER; note = uracil
  modified_base 67: mod_base = OTHER; note = uracil
  modified_base 74..75: mod_base = OTHER; note = uracil
  modified_base 79: mod_base = OTHER; note = uracil
  modified_base 92: mod_base = OTHER; note = uracil
  modified_base 98: mod_base = OTHER; note = uracil
  modified_base 113..115: mod_base = OTHER; note = uracil
  modified_base 119: mod_base = OTHER; note = uracil
  modified_base 122..123: mod_base = OTHER; note = uracil
  modified_base 127: mod_base = OTHER; note = uracil
  modified_base 130: mod_base = OTHER; note = uracil
  modified_base 134: mod_base = OTHER; note = uracil
  modified_base 140..141: mod_base = OTHER; note = uracil
  modified_base 154: mod_base = OTHER; note = uracil
  modified_base 166: mod_base = OTHER; note = uracil
  modified_base 168: mod_base = OTHER; note = uracil
  modified_base 173: mod_base = OTHER; note = uracil
  modified_base 179: mod_base = OTHER; note = uracil
  modified_base 185: mod_base = OTHER; note = uracil
  modified_base 189: mod_base = OTHER; note = uracil
  modified_base 194..195: mod_base = OTHER; note = uracil
  modified_base 197: mod_base = OTHER; note = uracil
  modified_base 202: mod_base = OTHER; note = uracil
  modified_base 208..209: mod_base = OTHER; note = uracil
  modified_base 217: mod_base = OTHER; note = uracil
  modified_base 219..220: mod_base = OTHER; note = uracil
  modified_base 225: mod_base = OTHER; note = uracil
  modified_base 230: mod_base = OTHER; note = uracil
  modified_base 233: mod_base = OTHER; note = uracil
  modified_base 236: mod_base = OTHER; note = uracil
  modified_base 244..245: mod_base = OTHER; note = uracil
  modified_base 258: mod_base = OTHER; note = uracil
  modified_base 266: mod_base = OTHER; note = uracil
  modified_base 273: mod_base = OTHER; note = uracil
  modified_base 275: mod_base = OTHER; note = uracil
  modified_base 285: mod_base = OTHER; note = uracil
  modified_base 287: mod_base = OTHER; note = uracil
  modified_base 289..290: mod_base = OTHER; note = uracil
  modified_base 293: mod_base = OTHER; note = uracil
  modified_base 116: mod_base = m5c
  modified_base 174: mod_base = m5c
  modified_base 191: mod_base = m5c
  modified_base 210: mod_base = m5c
  modified_base 227: mod_base = m5c
  modified_base 260: mod_base = m5c
  variation 149: note = CpG site, residue is C if methylated or T(=U) if unmethylated
tttttttggaatttattattgtttggtaaattagagtttaagtataataattttgtgtaaaaaaggtatgagatttggtaaatggaaatgataggggtagagagaaaggaaatttcggtagttagttaatttttattatttatgatggygtggtaggaatgagaatataaggtcggagtagggataaatacggtttttgtttagatgttcgattttttttaggattcggtagtagttgagaggttaagggggaagggtacggtattttaggttttagaggaatttttttttgttgtattt

SEQ ID NO: 401 - DNA, 300 bp, synthetic construct
  source 1..300: mol_type = other DNA
  modified_base 2..4: mod_base = OTHER; note = uracil
  modified_base 10: mod_base = OTHER; note = uracil
  modified_base 12: mod_base = OTHER; note = uracil
  modified_base 51: mod_base = OTHER; note = uracil
  modified_base 56: mod_base = OTHER; note = uracil
  modified_base 58..60: mod_base = OTHER; note = uracil
  modified_base 65: mod_base = OTHER; note = uracil
  modified_base 71: mod_base = OTHER; note = uracil
  modified_base 75: mod_base = OTHER; note = uracil
  modified_base 77: mod_base = OTHER; note = uracil
  modified_base 81: mod_base = OTHER; note = uracil
  modified_base 83: mod_base = OTHER; note = uracil
  modified_base 86: mod_base = OTHER; note = uracil
  modified_base 90: mod_base = OTHER; note = uracil
  modified_base 98..99: mod_base = OTHER; note = uracil
  modified_base 103: mod_base = OTHER; note = uracil
  modified_base 105: mod_base = OTHER; note = uracil
  modified_base 109: mod_base = OTHER; note = uracil
  modified_base 114: mod_base = OTHER; note = uracil
  modified_base 117..120: mod_base = OTHER; note = uracil
  modified_base 123..124: mod_base = OTHER; note = uracil
  modified_base 127..128: mod_base = OTHER; note = uracil
  modified_base 131..132: mod_base = OTHER; note = uracil
  modified_base 136: mod_base = OTHER; note = uracil
  modified_base 140..142: mod_base = OTHER; note = uracil
  modified_base 152: mod_base = OTHER; note = uracil
  modified_base 156: mod_base = OTHER; note = uracil
  modified_base 158..159: mod_base = OTHER; note = uracil
  modified_base 165: mod_base = OTHER; note = uracil
  modified_base 170: mod_base = OTHER; note = uracil
  modified_base 180..182: mod_base = OTHER; note = uracil
  modified_base 186: mod_base = OTHER; note = uracil
  modified_base 188..191: mod_base = OTHER; note = uracil
  modified_base 194..195: mod_base = OTHER; note = uracil
  modified_base 197..198: mod_base = OTHER; note = uracil
  modified_base 202..205: mod_base = OTHER; note = uracil
  modified_base 208..209: mod_base = OTHER; note = uracil
  modified_base 212: mod_base = OTHER; note = uracil
  modified_base 215: mod_base = OTHER; note = uracil
  modified_base 217..218: mod_base = OTHER; note = uracil
  modified_base 220: mod_base = OTHER; note = uracil
  modified_base 225..230: mod_base = OTHER; note = uracil
  modified_base 234..236: mod_base = OTHER; note = uracil
  modified_base 245: mod_base = OTHER; note = uracil
  modified_base 247: mod_base = OTHER; note = uracil
  modified_base 268..269: mod_base = OTHER; note = uracil
  modified_base 280..282: mod_base = OTHER; note = uracil
  modified_base 287..290: mod_base = OTHER; note = uracil
  modified_base 295..296: mod_base = OTHER; note = uracil
  modified_base 20: mod_base = m5c
  modified_base 48: mod_base = m5c
  modified_base 61: mod_base = m5c
  modified_base 66: mod_base = m5c
  modified_base 100: mod_base = m5c
  modified_base 112: mod_base = m5c
  modified_base 115: mod_base = m5c
  modified_base 121: mod_base = m5c
  modified_base 134: mod_base = m5c
  modified_base 138: mod_base = m5c
  modified_base 144: mod_base = m5c
  modified_base 160: mod_base = m5c
  modified_base 163: mod_base = m5c
  modified_base 168: mod_base = m5c
  modified_base 183: mod_base = m5c
  modified_base 199: mod_base = m5c
  modified_base 210: mod_base = m5c
  modified_base 221: mod_base = m5c
  modified_base 248: mod_base = m5c
  modified_base 258: mod_base = m5c
  modified_base 260: mod_base = m5c
  modified_base 271: mod_base = m5c
  modified_base 283: mod_base = m5c
  variation 150: note = CpG site, residue is C if methylated or T(=U) if unmethylated
gttttgagatattaaatggcgggggggtggggggaggaaagggaaggcggtagagtttttcgagtcgggatagttatttattttataggtagtggggttcgatatagatagcgtcgttttcgttagttagtttcgtacgttttcggaagygtaggttttcggcgttgcgttggagggtttttcggtattttagtttttcgtttttagttcgttgtattttcgggttttttttatttttgagaggtatcgggagttgtcgcgggggggtttcgggaaatttttcggatttttgtgttagga

SEQ ID NO: 402 - DNA, 300 bp, synthetic construct
  source 1..300: mol_type = other DNA
  modified_base 2..3: mod_base = OTHER; note = uracil
  modified_base 7: mod_base = OTHER; note = uracil
  modified_base 9: mod_base = OTHER; note = uracil
  modified_base 16: mod_base = OTHER; note = uracil
  modified_base 27..28: mod_base = OTHER; note = uracil
  modified_base 34..39: mod_base = OTHER; note = uracil
  modified_base 45: mod_base = OTHER; note = uracil
  modified_base 48: mod_base = OTHER; note = uracil
  modified_base 50..51: mod_base = OTHER; note = uracil
  modified_base 57..58: mod_base = OTHER; note = uracil
  modified_base 60: mod_base = OTHER; note = uracil
  modified_base 62: mod_base = OTHER; note = uracil
  modified_base 77..78: mod_base = OTHER; note = uracil
  modified_base 87: mod_base = OTHER; note = uracil
  modified_base 94: mod_base = OTHER; note = uracil
  modified_base 108: mod_base = OTHER; note = uracil
  modified_base 116: mod_base = OTHER; note = uracil
  modified_base 124..126: mod_base = OTHER; note = uracil
  modified_base 128..129: mod_base = OTHER; note = uracil
  modified_base 134: mod_base = OTHER; note = uracil
  modified_base 139: mod_base = OTHER; note = uracil
  modified_base 146..147: mod_base = OTHER; note = uracil
  modified_base 152: mod_base = OTHER; note = uracil
  modified_base 155: mod_base = OTHER; note = uracil
  modified_base 171: mod_base = OTHER; note = uracil
  modified_base 175: mod_base = OTHER; note = uracil
  modified_base 190: mod_base = OTHER; note = uracil
  modified_base 194: mod_base = OTHER; note = uracil
  modified_base 204..207: mod_base = OTHER; note = uracil
  modified_base 209: mod_base = OTHER; note = uracil
  modified_base 212..213: mod_base = OTHER; note = uracil
  modified_base 228: mod_base = OTHER; note = uracil
  modified_base 232..233: mod_base = OTHER; note = uracil
  modified_base 237: mod_base = OTHER; note = uracil
  modified_base 246: mod_base = OTHER; note = uracil
  modified_base 248: mod_base = OTHER; note = uracil
  modified_base 251: mod_base = OTHER; note = uracil
  modified_base 254..255: mod_base = OTHER; note = uracil
  modified_base 258..260: mod_base = OTHER; note = uracil
  modified_base 264..265: mod_base = OTHER; note = uracil
  modified_base 267..272: mod_base = OTHER; note = uracil
  modified_base 274..279: mod_base = OTHER; note = uracil
  modified_base 282..283: mod_base = OTHER; note = uracil
  modified_base 293: mod_base = OTHER; note = uracil
  modified_base 295: mod_base = OTHER; note = uracil
  modified_base 300: mod_base = OTHER; note = uracil
  modified_base 17: mod_base = m5c
  modified_base 29: mod_base = m5c
  modified_base 40: mod_base = m5c
  modified_base 42: mod_base = m5c
  modified_base 52: mod_base = m5c
  modified_base 79: mod_base = m5c
  modified_base 90: mod_base = m5c
  modified_base 101: mod_base = m5c
  modified_base 117: mod_base = m5c
  modified_base 132: mod_base = m5c
  modified_base 137: mod_base = m5c
  modified_base 140: mod_base = m5c
  modified_base 156: mod_base = m5c
  modified_base 162: mod_base = m5c
  modified_base 166: mod_base = m5c
  modified_base 179: mod_base = m5c
  modified_base 185: mod_base = m5c
  modified_base 188: mod_base = m5c
  modified_base 200: mod_base = m5c
  modified_base 234: mod_base = m5c
  modified_base 239: mod_base = m5c
  modified_base 252: mod_base = m5c
  modified_base 280: mod_base = m5c
  variation 150: note = CpG site, residue is C if methylated or T(=U) if unmethylated
ttttggtataggggttcggggaatttttcgaggttttttcgcgataattttcggtgttttttaagggtaaggggggttcggaggtgtagcgggttggggacgggaggttggggtgtcggggaattttttagcgtagcgtcgggagtttgygttttcgagggcgtgcgaggttggttggcgggggcggcgttgtttgtgtcgggttttattgtttgtagagtaagtgattgtttcggttcggggagttttgtcgtttttttttttttttttttattttttcgttatttagtgttttagggt

SEQ ID NO: 403 - DNA, 300 bp, synthetic construct
  source 1..300: mol_type = other DNA
  modified_base 2..3: mod_base = OTHER; note = uracil
  modified_base 5: mod_base = OTHER; note = uracil
  modified_base 8: mod_base = OTHER; note = uracil
  modified_base 10: mod_base = OTHER; note = uracil
  modified_base 13: mod_base = OTHER; note = uracil
  modified_base 25..28: mod_base = OTHER; note = uracil
  modified_base 31: mod_base = OTHER; note = uracil
  modified_base 43: mod_base = OTHER; note = uracil
  modified_base 47: mod_base = OTHER; note = uracil
  modified_base 49: mod_base = OTHER; note = uracil
  modified_base 51: mod_base = OTHER; note = uracil
  modified_base 72: mod_base = OTHER; note = uracil
  modified_base 93: mod_base = OTHER; note = uracil
  modified_base 99: mod_base = OTHER; note = uracil
  modified_base 105: mod_base = OTHER; note = uracil
  modified_base 107..109: mod_base = OTHER; note = uracil
  modified_base 112..113: mod_base = OTHER; note = uracil
  modified_base 117: mod_base = OTHER; note = uracil
  modified_base 121..123: mod_base = OTHER; note = uracil
  modified_base 128: mod_base = OTHER; note = uracil
  modified_base 136..137: mod_base = OTHER; note = uracil
  modified_base 143: mod_base = OTHER; note = uracil
  modified_base 157: mod_base = OTHER; note = uracil
  modified_base 161..162: mod_base = OTHER; note = uracil
  modified_base 174: mod_base = OTHER; note = uracil
  modified_base 198: mod_base = OTHER; note = uracil
  modified_base 202..203: mod_base = OTHER; note = uracil
  modified_base 206: mod_base = OTHER; note = uracil
  modified_base 214..215: mod_base = OTHER; note = uracil
  modified_base 219: mod_base = OTHER; note = uracil
  modified_base 221: mod_base = OTHER; note = uracil
  modified_base 223..224: mod_base = OTHER; note = uracil
  modified_base 226..227: mod_base = OTHER; note = uracil
  modified_base 230..231: mod_base = OTHER; note = uracil
  modified_base 234..236: mod_base = OTHER; note = uracil
  modified_base 238..239: mod_base = OTHER; note = uracil
  modified_base 244..245: mod_base = OTHER; note = uracil
  modified_base 247: mod_base = OTHER; note = uracil
  modified_base 251: mod_base = OTHER; note = uracil
  modified_base 267: mod_base = OTHER; note = uracil
  modified_base 269: mod_base = OTHER; note = uracil
  modified_base 288: mod_base = OTHER; note = uracil
  modified_base 295: mod_base = OTHER; note = uracil
  modified_base 298..299: mod_base = OTHER; note = uracil
  modified_base 129: mod_base = m5c
  modified_base 140: mod_base = m5c
  modified_base 241: mod_base = m5c
  modified_base 252: mod_base = m5c
  modified_base 262: mod_base = m5c
  modified_base 272: mod_base = m5c
  modified_base 292: mod_base = m5c
  variation 151: note = CpG site, residue is C if methylated or T(=U) if unmethylated
  variation 228: note = CpG site, residue is C if methylated or T(=U) if unmethylated
  variation 232: note = CpG site, residue is C if methylated or T(=U) if unmethylated
attatagtattgtaggaggatgagtttttgtaggaaggaatgttggttttttggggtagataaagaaggttttggggaagggaagggaggaataggaatatgggttttttgttaggttgttttaggttcgggatgttatcggtaagtgggyggggataggtttgggtagatgatatggtagtgagtaagtggggaggtaggttagtagaggagttaggtttatttttygttygtttatttcggttatagatcgggaggggtcggagtattgcgttggggttgatgagtagacgattgtta

SEQ ID NO: 404 - DNA, 300 bp, synthetic construct
  source 1..300: mol_type = other DNA
  modified_base 4: mod_base = OTHER; note = uracil
  modified_base 11: mod_base = OTHER; note = uracil
  modified_base 14: mod_base = OTHER; note = uracil
  modified_base 16: mod_base = OTHER; note = uracil
  modified_base 19: mod_base = OTHER; note = uracil
  modified_base 22..25: mod_base = OTHER; note = uracil
  modified_base 30: mod_base = OTHER; note = uracil
  modified_base 35: mod_base = OTHER; note = uracil
  modified_base 37: mod_base = OTHER; note = uracil
  modified_base 41..44: mod_base = OTHER; note = uracil
  modified_base 46..47: mod_base = OTHER; note = uracil
  modified_base 52: mod_base = OTHER; note = uracil
  modified_base 58: mod_base = OTHER; note = uracil
  modified_base 83..84: mod_base = OTHER; note = uracil
  modified_base 88: mod_base = OTHER; note = uracil
  modified_base 90..91: mod_base = OTHER; note = uracil
  modified_base 93: mod_base = OTHER; note = uracil
  modified_base 96: mod_base = OTHER; note = uracil
  modified_base 100..101: mod_base = OTHER; note = uracil
  modified_base 104..105: mod_base = OTHER; note = uracil
  modified_base 107..110: mod_base = OTHER; note = uracil
  modified_base 112: mod_base = OTHER; note = uracil
  modified_base 116: mod_base = OTHER; note = uracil
  modified_base 118: mod_base = OTHER; note = uracil
  modified_base 120: mod_base = OTHER; note = uracil
  modified_base 123..124: mod_base = OTHER; note = uracil
  modified_base 129: mod_base = OTHER; note = uracil
  modified_base 132: mod_base = OTHER; note = uracil
  modified_base 135..137: mod_base = OTHER; note = uracil
  modified_base 141..142: mod_base = OTHER; note = uracil
  modified_base 146..148: mod_base = OTHER; note = uracil
  modified_base 151..153: mod_base = OTHER; note = uracil
  modified_base 155: mod_base = OTHER; note = uracil
  modified_base 159: mod_base = OTHER; note = uracil
  modified_base 166: mod_base = OTHER; note = uracil
  modified_base 169..170: mod_base = OTHER; note = uracil
  modified_base 175..176: mod_base = OTHER; note = uracil
  modified_base 182: mod_base = OTHER; note = uracil
  modified_base 185..186: mod_base = OTHER; note = uracil
  modified_base 190: mod_base = OTHER; note = uracil
  modified_base 197..199: mod_base = OTHER; note = uracil
  modified_base 205..206: mod_base = OTHER; note = uracil
  modified_base 211..212: mod_base = OTHER; note = uracil
  modified_base 214..216: mod_base = OTHER; note = uracil
  modified_base 219..221: mod_base = OTHER; note = uracil
  modified_base 224..227: mod_base = OTHER; note = uracil
  modified_base 232..233: mod_base = OTHER; note = uracil
  modified_base 236: mod_base = OTHER; note = uracil
  modified_base 242: mod_base = OTHER; note = uracil
  modified_base 245..248: mod_base = OTHER; note = uracil
  modified_base 255..256: mod_base = OTHER; note = uracil
  modified_base 259: mod_base = OTHER; note = uracil
  modified_base 263..264: mod_base = OTHER; note = uracil
  modified_base 267..268: mod_base = OTHER; note = uracil
  modified_base 271: mod_base = OTHER; note = uracil
  modified_base 277: mod_base = OTHER; note = uracil
  modified_base 279: mod_base = OTHER; note = uracil
  modified_base 282..283: mod_base = OTHER; note = uracil
  modified_base 285..286: mod_base = OTHER; note = uracil
  modified_base 289: mod_base = OTHER; note = uracil
  modified_base 294: mod_base = OTHER; note = uracil
  modified_base 8: mod_base = m5c
  modified_base 28: mod_base = m5c
  modified_base 38: mod_base = m5c
  modified_base 48: mod_base = m5c
  modified_base 59: mod_base = m5c
  modified_base 160: mod_base = m5c
  modified_base 171: mod_base = m5c
  variation 68: note = CpG site, residue is C if methylated or T(=U) if unmethylated
  variation 72: note = CpG site, residue is C if methylated or T(=U) if unmethylated
  variation 149: note = CpG site, residue is C if methylated or T(=U) if unmethylated
tggtagtcgtttgtttattaattttaacgtagtgtttcgatttttttcggtttgtggtcgaggtgggygggygggaggtgagtttggtttttttgttggtttgtttttttatttatttattattatgttatttatttaggtttgttttygtttatttgtcgatggtatttcggatttgggatagtttggtagggagtttatgtttttgtttttttttttttttttttagaattttttttatttattttagagagttagtatttttttttgtaggggtttatttttttgtagtgttgtggt

SEQ ID NO: 405 - DNA, 300 bp, synthetic construct
  source 1..300: mol_type = other DNA
  modified_base 15: mod_base = OTHER; note = uracil
  modified_base 21: mod_base = OTHER; note = uracil
  modified_base 27: mod_base = OTHER; note = uracil
  modified_base 29..31: mod_base = OTHER; note = uracil
  modified_base 34..35: mod_base = OTHER; note = uracil
  modified_base 39: mod_base = OTHER; note = uracil
  modified_base 43..45: mod_base = OTHER; note = uracil
  modified_base 50: mod_base = OTHER; note = uracil
  modified_base 58..59: mod_base = OTHER; note = uracil
  modified_base 65: mod_base = OTHER; note = uracil
  modified_base 79: mod_base = OTHER; note = uracil
  modified_base 83..84: mod_base = OTHER; note = uracil
  modified_base 96: mod_base = OTHER; note = uracil
  modified_base 120: mod_base = OTHER; note = uracil
  modified_base 124..125: mod_base = OTHER; note = uracil
  modified_base 128: mod_base = OTHER; note = uracil
  modified_base 136..137: mod_base = OTHER; note = uracil
  modified_base 141: mod_base = OTHER; note = uracil
  modified_base 143: mod_base = OTHER; note = uracil
  modified_base 145..146: mod_base = OTHER; note = uracil
  modified_base 148..149: mod_base = OTHER; note = uracil
  modified_base 152..153: mod_base = OTHER; note = uracil
  modified_base 156..158: mod_base = OTHER; note = uracil
  modified_base 160..161: mod_base = OTHER; note = uracil
  modified_base 166..167: mod_base = OTHER; note = uracil
  modified_base 169: mod_base = OTHER; note = uracil
  modified_base 173: mod_base = OTHER; note = uracil
  modified_base 189: mod_base = OTHER; note = uracil
  modified_base 191: mod_base = OTHER; note = uracil
  modified_base 210: mod_base = OTHER; note = uracil
  modified_base 217: mod_base = OTHER; note = uracil
  modified_base 220..221: mod_base = OTHER; note = uracil
  modified_base 225: mod_base = OTHER; note = uracil
  modified_base 228..229: mod_base = OTHER; note = uracil
  modified_base 233: mod_base = OTHER; note = uracil
  modified_base 235: mod_base = OTHER; note = uracil
  modified_base 245: mod_base = OTHER; note = uracil
  modified_base 247: mod_base = OTHER; note = uracil
  modified_base 253: mod_base = OTHER; note = uracil
  modified_base 255: mod_base = OTHER; note = uracil
  modified_base 262..263: mod_base = OTHER; note = uracil
  modified_base 266: mod_base = OTHER; note = uracil
  modified_base 269..274: mod_base = OTHER; note = uracil
  modified_base 277..278: mod_base = OTHER; note = uracil
  modified_base 280..282: mod_base = OTHER; note = uracil
  modified_base 284: mod_base = OTHER; note = uracil
  modified_base 290: mod_base = OTHER; note = uracil
  modified_base 51: mod_base = m5c
  modified_base 62: mod_base = m5c
  modified_base 163: mod_base = m5c
  modified_base 174: mod_base = m5c
  modified_base 184: mod_base = m5c
  modified_base 194: mod_base = m5c
  modified_base 214: mod_base = m5c
  modified_base 251: mod_base = m5c
  variation 73: note = CpG site, residue is C if methylated or T(=U) if unmethylated
  variation 150: note = CpG site, residue is C if methylated or T(=U) if unmethylated
  variation 154: note = CpG site, residue is C if methylated or T(=U) if unmethylated
agggaagggaggaataggaatatgggttttttgttaggttgttttaggttcgggatgttatcggtaagtgggyggggataggtttgggtagatgatatggtagtgagtaagtggggaggtaggttagtagaggagttaggtttatttttygttygtttatttcggttatagatcgggaggggtcggagtattgcgttggggttgatgagtagacgattgttaggtagttatttataggaaatggtatagacgtatattgttttagttattttttatttttttttaggggtaaagtgaatg

SEQ ID NO: 406 - DNA, 300 bp, synthetic construct
  source 1..300: mol_type = other DNA
  modified_base 4: mod_base = OTHER; note = uracil
  modified_base 6: mod_base = OTHER; note = uracil
  modified_base 11..14: mod_base = OTHER; note = uracil
  modified_base 35: mod_base = OTHER; note = uracil
  modified_base 41: mod_base = OTHER; note = uracil
  modified_base 51: mod_base = OTHER; note = uracil
  modified_base 56..57: mod_base = OTHER; note = uracil
  modified_base 62..63: mod_base = OTHER; note = uracil
  modified_base 73: mod_base = OTHER; note = uracil
  modified_base 76..77: mod_base = OTHER; note = uracil
  modified_base 81: mod_base = OTHER; note = uracil
  modified_base 88: mod_base = OTHER; note = uracil
  modified_base 91: mod_base = OTHER; note = uracil
  modified_base 93: mod_base = OTHER; note = uracil
  modified_base 96: mod_base = OTHER; note = uracil
  modified_base 99..102: mod_base = OTHER; note = uracil
  modified_base 107: mod_base = OTHER; note = uracil
  modified_base 112: mod_base = OTHER; note = uracil
  modified_base 114: mod_base = OTHER; note = uracil
  modified_base 118..121: mod_base = OTHER; note = uracil
  modified_base 123..124: mod_base = OTHER; note = uracil
  modified_base 129: mod_base = OTHER; note = uracil
  modified_base 135: mod_base = OTHER; note = uracil
  modified_base 160..161: mod_base = OTHER; note = uracil
  modified_base 165: mod_base = OTHER; note = uracil
  modified_base 167..168: mod_base = OTHER; note = uracil
  modified_base 170: mod_base = OTHER; note = uracil
  modified_base 173: mod_base = OTHER; note = uracil
  modified_base 177..178: mod_base = OTHER; note = uracil
  modified_base 181..182: mod_base = OTHER; note = uracil
  modified_base 184..187: mod_base = OTHER; note = uracil
  modified_base 189: mod_base = OTHER; note = uracil
  modified_base 193: mod_base = OTHER; note = uracil
  modified_base 195: mod_base = OTHER; note = uracil
  modified_base 197: mod_base = OTHER; note = uracil
  modified_base 200..201: mod_base = OTHER; note = uracil
  modified_base 206: mod_base = OTHER; note = uracil
  modified_base 209: mod_base = OTHER; note = uracil
  modified_base 212..214: mod_base = OTHER; note = uracil
  modified_base 218..219: mod_base = OTHER; note = uracil
  modified_base 223..225: mod_base = OTHER; note = uracil
  modified_base 228..230: mod_base = OTHER; note = uracil
  modified_base 232: mod_base = OTHER; note = uracil
  modified_base 236: mod_base = OTHER; note = uracil
  modified_base 243: mod_base = OTHER; note = uracil
  modified_base 246..247: mod_base = OTHER; note = uracil
  modified_base 252..253: mod_base = OTHER; note = uracil
  modified_base 259: mod_base = OTHER; note = uracil
  modified_base 262..263: mod_base = OTHER; note = uracil
  modified_base 267: mod_base = OTHER; note = uracil
  modified_base 274..276: mod_base = OTHER; note = uracil
  modified_base 282..283: mod_base = OTHER; note = uracil
  modified_base 288..289: mod_base = OTHER; note = uracil
  modified_base 291..293: mod_base = OTHER; note = uracil
  modified_base 296..298: mod_base = OTHER; note = uracil
  modified_base 48: mod_base = m5c
  modified_base 85: mod_base = m5c
  modified_base 105: mod_base = m5c
  modified_base 115: mod_base = m5c
  modified_base 125: mod_base = m5c
  modified_base 136: mod_base = m5c
  modified_base 237: mod_base = m5c
  modified_base 248: mod_base = m5c
  variation 145: note = CpG site, residue is C if methylated or T(=U) if unmethylated
  variation 149: note = CpG site, residue is C if methylated or T(=U) if unmethylated
  variation 226: note = CpG site, residue is C if methylated or T(=U) if unmethylated
atttattttgtttttgagggaggatggggggtagttggaataatgtgcgtttgtgttattttttgtgaatggttgtttggtagtcgtttgtttattaattttaacgtagtgtttcgatttttttcggtttgtggtcgaggtgggygggygggaggtgagtttggtttttttgttggtttgtttttttatttatttattattatgttatttatttaggtttgttttygtttatttgtcgatggtatttcggatttgggatagtttggtagggagtttatgtttttgttttttttttttttt

SEQ ID NO: 407 - DNA, 300 bp, synthetic construct
  source 1..300: mol_type = other DNA
  modified_base 5: mod_base = OTHER; note = uracil
  modified_base 10: mod_base = OTHER; note = uracil
  modified_base 12: mod_base = OTHER; note = uracil
  modified_base 14: mod_base = OTHER; note = uracil
  modified_base 18..19: mod_base = OTHER; note = uracil
  modified_base 27: mod_base = OTHER; note = uracil
  modified_base 30: mod_base = OTHER; note = uracil
  modified_base 40..41: mod_base = OTHER; note = uracil
  modified_base 49..50: mod_base = OTHER; note = uracil
  modified_base 54: mod_base = OTHER; note = uracil
  modified_base 64: mod_base = OTHER; note = uracil
  modified_base 70: mod_base = OTHER; note = uracil
  modified_base 72: mod_base = OTHER; note = uracil
  modified_base 90: mod_base = OTHER; note = uracil
  modified_base 101: mod_base = OTHER; note = uracil
  modified_base 103: mod_base = OTHER; note = uracil
  modified_base 116: mod_base = OTHER; note = uracil
  modified_base 121: mod_base = OTHER; note = uracil
  modified_base 133: mod_base = OTHER; note = uracil
  modified_base 136: mod_base = OTHER; note = uracil
  modified_base 141..142: mod_base = OTHER; note = uracil
  modified_base 144: mod_base = OTHER; note = uracil
  modified_base 148: mod_base = OTHER; note = uracil
  modified_base 157: mod_base = OTHER; note = uracil
  modified_base 160: mod_base = OTHER; note = uracil
  modified_base 164: mod_base = OTHER; note = uracil
  modified_base 169..170: mod_base = OTHER; note = uracil
  modified_base 172..173: mod_base = OTHER; note = uracil
  modified_base 175..179: mod_base = OTHER; note = uracil
  modified_base 184: mod_base = OTHER; note = uracil
  modified_base 187: mod_base = OTHER; note = uracil
  modified_base 190..191: mod_base = OTHER; note = uracil
  modified_base 195..197: mod_base = OTHER; note = uracil
  modified_base 200..201: mod_base = OTHER; note = uracil
  modified_base 203: mod_base = OTHER; note = uracil
  modified_base 210: mod_base = OTHER; note = uracil
  modified_base 212: mod_base = OTHER; note = uracil
  modified_base 217: mod_base = OTHER; note = uracil
  modified_base 219..220: mod_base = OTHER; note = uracil
  modified_base 223: mod_base = OTHER; note = uracil
  modified_base 230: mod_base = OTHER; note = uracil
  modified_base 232: mod_base = OTHER; note = uracil
  modified_base 236: mod_base = OTHER; note = uracil
  modified_base 242: mod_base = OTHER; note = uracil
  modified_base 250: mod_base = OTHER; note = uracil
  modified_base 256: mod_base = OTHER; note = uracil
  modified_base 258: mod_base = OTHER; note = uracil
  modified_base 264..265: mod_base = OTHER; note = uracil
  modified_base 267: mod_base = OTHER; note = uracil
  modified_base 270: mod_base = OTHER; note = uracil
  modified_base 288..292: mod_base = OTHER; note = uracil
  modified_base 145: mod_base = m5c
  modified_base 181: mod_base = m5c
  modified_base 251: mod_base = m5c
  modified_base 271: mod_base = m5c
  variation 150: note = CpG site, residue is C if methylated or T(=U) if unmethylated
ggttttaaatatataaatttttgatgtatttggaatttattttaattttttagtaatttttattaatggtttaatatttgggggatttttatggtaattgtattgaatgtattaattggttagggaggattatattaagattatcggttygagaaatagtagtttgtttttttatttttacgtttgtatttaggtttttttatagagattttattttttttgtagatgatttatttagtgtttaggaattcggtgttttgtggttattatcgagagtgggatatttttttttattttatt

SEQ ID NO: 408 - DNA, 300 bp, synthetic construct
  source 1..300: mol_type = other DNA
  modified_base 21..23: mod_base = OTHER; note = uracil
  modified_base 25: mod_base = OTHER; note = uracil
  modified_base 27: mod_base = OTHER; note = uracil
  modified_base 38..39: mod_base = OTHER; note = uracil
  modified_base 41: mod_base = OTHER; note = uracil
  modified_base 46: mod_base = OTHER; note = uracil
  modified_base 48: mod_base = OTHER; note = uracil
  modified_base 55..56: mod_base = OTHER; note = uracil
  modified_base 61: mod_base = OTHER; note = uracil
  modified_base 63: mod_base = OTHER; note = uracil
  modified_base 73: mod_base = OTHER; note = uracil
  modified_base 76: mod_base = OTHER; note = uracil
  modified_base 79: mod_base = OTHER; note = uracil
  modified_base 94: mod_base = OTHER; note = uracil
  modified_base 96: mod_base = OTHER; note = uracil
  modified_base 107..108: mod_base = OTHER; note = uracil
  modified_base 115: mod_base = OTHER; note = uracil
  modified_base 135: mod_base = OTHER; note = uracil
  modified_base 139: mod_base = OTHER; note = uracil
  modified_base 142: mod_base = OTHER; note = uracil
  modified_base 148: mod_base = OTHER; note = uracil
  modified_base 154: mod_base = OTHER; note = uracil
  modified_base 162: mod_base = OTHER; note = uracil
  modified_base 173..174: mod_base = OTHER; note = uracil
  modified_base 176..178: mod_base = OTHER; note = uracil
  modified_base 182..183: mod_base = OTHER; note = uracil
  modified_base 192: mod_base = OTHER; note = uracil
  modified_base 196: mod_base = OTHER; note = uracil
  modified_base 201: mod_base = OTHER; note = uracil
  modified_base 207..208: mod_base = OTHER; note = uracil
  modified_base 217..221: mod_base = OTHER; note = uracil
  modified_base 232..233: mod_base = OTHER; note = uracil
  modified_base 248: mod_base = OTHER; note = uracil
  modified_base 268..269: mod_base = OTHER; note = uracil
  modified_base 275: mod_base = OTHER; note = uracil
  modified_base 278: mod_base = OTHER; note = uracil
  modified_base 299..300: mod_base = OTHER; note = uracil
  modified_base 29: mod_base = m5c
  modified_base 49: mod_base = m5c
  modified_base 119: mod_base = m5c
  modified_base 155: mod_base = m5c
  variation 150: note = CpG site, residue is C if methylated or T(=U) if unmethylated
aataaaatgggggaaaatattttattttcggtagtggttatagagtatcggatttttagatattgaatgagttatttgtaggagaaatgagatttttgtggaagggtttggatgtagacgtgggggtggaggaatagattgttgtttttygagtcggtggttttgatgtaattttttttgattagttaatatatttagtgtaattattatgaaaattttttaaatattgagttattgataaaaattgttaggaaattaaggtaaattttagatgtattaaaggtttgtgtgtttagaatt

SEQ ID NO: 409 - DNA, 300 bp, synthetic construct
  source 1..300: mol_type = other DNA
  modified_base 10: mod_base = OTHER; note = uracil
  modified_base 21: mod_base = OTHER; note = uracil
  modified_base 25..28: mod_base = OTHER; note = uracil
  modified_base 30: mod_base = OTHER; note = uracil
  modified_base 34..35: mod_base = OTHER; note = uracil
  modified_base 39: mod_base = OTHER; note = uracil
  modified_base 45..48: mod_base = OTHER; note = uracil
  modified_base 51..56: mod_base = OTHER; note = uracil
  modified_base 58..60: mod_base = OTHER; note = uracil
  modified_base 62: mod_base = OTHER; note = uracil
  modified_base 66: mod_base = OTHER; note = uracil
  modified_base 70..72: mod_base = OTHER; note = uracil
  modified_base 87: mod_base = OTHER; note = uracil
  modified_base 89: mod_base = OTHER; note = uracil
  modified_base 91..92: mod_base = OTHER; note = uracil
  modified_base 102: mod_base = OTHER; note = uracil
  modified_base 112..113: mod_base = OTHER; note = uracil
  modified_base 120: mod_base = OTHER; note = uracil
  modified_base 125: mod_base = OTHER; note = uracil
  modified_base 129: mod_base = OTHER; note = uracil
  modified_base 131: mod_base = OTHER; note = uracil
  modified_base 137..140: mod_base = OTHER; note = uracil
  modified_base 156: mod_base = OTHER; note = uracil
  modified_base 162: mod_base = OTHER; note = uracil
  modified_base 172: mod_base = OTHER; note = uracil
  modified_base 176: mod_base = OTHER; note = uracil
  modified_base 181..183: mod_base = OTHER; note = uracil
  modified_base 186..189: mod_base = OTHER; note = uracil
  modified_base 191: mod_base = OTHER; note = uracil
  modified_base 194..196: mod_base = OTHER; note = uracil
  modified_base 200..201: mod_base = OTHER; note = uracil
  modified_base 206..207: mod_base = OTHER; note = uracil
  modified_base 209..210: mod_base = OTHER; note = uracil
  modified_base 212..214: mod_base = OTHER; note = uracil
  modified_base 216..218: mod_base = OTHER; note = uracil
  modified_base 220..222: mod_base = OTHER; note = uracil
  modified_base 226: mod_base = OTHER; note = uracil
  modified_base 228..230: mod_base = OTHER; note = uracil
  modified_base 232..234: mod_base = OTHER; note = uracil
  modified_base 236..238: mod_base = OTHER; note = uracil
  modified_base 240..242: mod_base = OTHER; note = uracil
  modified_base 244..246: mod_base = OTHER; note = uracil
  modified_base 248..250: mod_base = OTHER; note = uracil
  modified_base 252..254: mod_base = OTHER; note = uracil
  modified_base 256..258: mod_base = OTHER; note = uracil
  modified_base 260..262: mod_base = OTHER; note = uracil
  modified_base 264..265: mod_base = OTHER; note = uracil
  modified_base 267..268: mod_base = OTHER; note = uracil
  modified_base 271: mod_base = OTHER; note = uracil
  modified_base 276: mod_base = OTHER; note = uracil
  modified_base 285..286: mod_base = OTHER; note = uracil
  modified_base 289: mod_base = OTHER; note = uracil
  modified_base 291..293: mod_base = OTHER; note = uracil
  modified_base 298: mod_base = OTHER; note = uracil
  modified_base 126: mod_base = m5c
  modified_base 197: mod_base = m5c
  modified_base 224: mod_base = m5c
  variation 146: note = CpG site, residue is C if methylated or T(=U) if unmethylated
  variation 149: note = CpG site, residue is C if methylated or T(=U) if unmethylated
tttggggggtagggagggtttagtttttttaggtttggttgtgttttttgttttttatttataattaggtttagggttggggggtgtatattaaggaggggtaggaagtgtttaagaagtagaatcggttttgtgtttttagtggyggygggtgtttggggtaggaggaggttatttgattttttttttattgtttcggttatgattttttttttttttttttcgttttttttttttttttttttttttttttttttttttttttttttttatggttggggtagttagtattttgggttg

SEQ ID NO: 410 - DNA, 300 bp, synthetic construct
  source 1..300: mol_type = other DNA
  modified_base 3..5: mod_base = OTHER; note = uracil
  modified_base 12: mod_base = OTHER; note = uracil
  modified_base 16: mod_base = OTHER; note = uracil
  modified_base 19..22: mod_base = OTHER; note = uracil
  modified_base 25..26: mod_base = OTHER; note = uracil
  modified_base 96: mod_base = OTHER; note = uracil
  modified_base 101: mod_base = OTHER; note = uracil
  modified_base 107: mod_base = OTHER; note = uracil
  modified_base 122: mod_base = OTHER; note = uracil
  modified_base 129..130: mod_base = OTHER; note = uracil
  modified_base 132..133: mod_base = OTHER; note = uracil
  modified_base 135..136: mod_base = OTHER; note = uracil
  modified_base 139..142: mod_base = OTHER; note = uracil
  modified_base 146: mod_base = OTHER; note = uracil
  modified_base 148..149: mod_base = OTHER; note = uracil
  modified_base 152: mod_base = OTHER; note = uracil
  modified_base 155..156: mod_base = OTHER; note = uracil
  modified_base 158: mod_base = OTHER; note = uracil
  modified_base 165: mod_base = OTHER; note = uracil
  modified_base 167: mod_base = OTHER; note = uracil
  modified_base 172: mod_base = OTHER; note = uracil
  modified_base 178: mod_base = OTHER; note = uracil
  modified_base 181: mod_base = OTHER; note = uracil
  modified_base 184: mod_base = OTHER; note = uracil
  modified_base 190: mod_base = OTHER; note = uracil
  modified_base 192: mod_base = OTHER; note = uracil
  modified_base 195..196: mod_base = OTHER; note = uracil
  modified_base 199..202: mod_base = OTHER; note = uracil
  modified_base 204..205: mod_base = OTHER; note = uracil
  modified_base 214: mod_base = OTHER; note = uracil
  modified_base 216..221: mod_base = OTHER; note = uracil
  modified_base 224..226: mod_base = OTHER; note = uracil
  modified_base 231..232: mod_base = OTHER; note = uracil
  modified_base 250: mod_base = OTHER; note = uracil
  modified_base 257: mod_base = OTHER; note = uracil
  modified_base 259: mod_base = OTHER; note = uracil
  modified_base 262..263: mod_base = OTHER; note = uracil
  modified_base 267..268: mod_base = OTHER; note = uracil
  modified_base 277: mod_base = OTHER; note = uracil
  modified_base 282..284: mod_base = OTHER; note = uracil
  modified_base 286..288: mod_base = OTHER; note = uracil
  modified_base 291..296: mod_base = OTHER; note = uracil
  modified_base 75: mod_base = m5c
  modified_base 102: mod_base = m5c
  modified_base 173: mod_base = m5c
  variation 150: note = CpG site, residue is C if methylated or T(=U) if unmethylated
  variation 153: note = CpG site, residue is C if methylated or T(=U) if unmethylated
agtttagggtgttggttattttagttatgaaggaggagggagggagggagggagggagggagggagggagggagcgagggagggagggaggaggttatggtcggggtagtggggaagggattagatagtttttttttgttttagatattygtygttattggggatatagagtcggttttgttttttggatattttttgtttttttttggtgtgtattttttaattttgggtttgattgtgggtggggggtaggggatatagttaggtttgaggggattgaattttttttgttttttaaag

SEQ ID NO: 411 - DNA, 300 bp, synthetic construct
  source 1..300: mol_type = other DNA
  modified_base 1..2: mod_base = OTHER; note = uracil
  modified_base 5: mod_base = OTHER; note = uracil
  modified_base 9..10: mod_base = OTHER; note = uracil
  modified_base 14..17: mod_base = OTHER; note = uracil
  modified_base 19..20: mod_base = OTHER; note = uracil
  modified_base 24..25: mod_base = OTHER; note = uracil
  modified_base 29..31: mod_base = OTHER; note = uracil
  modified_base 33..35: mod_base = OTHER; note = uracil
  modified_base 37..38: mod_base = OTHER; note = uracil
  modified_base 42: mod_base = OTHER; note = uracil
  modified_base 52..53: mod_base = OTHER; note = uracil
  modified_base 57: mod_base = OTHER; note = uracil
  modified_base 65..66: mod_base = OTHER; note = uracil
  modified_base 72: mod_base = OTHER; note = uracil
  modified_base 96..97: mod_base = OTHER; note = uracil
  modified_base 101: mod_base = OTHER; note = uracil
  modified_base 106: mod_base = OTHER; note = uracil
  modified_base 113: mod_base = OTHER; note = uracil
  modified_base 115: mod_base = OTHER; note = uracil
  modified_base 127..128: mod_base = OTHER; note = uracil
  modified_base 135: mod_base = OTHER; note = uracil
  modified_base 137: mod_base = OTHER; note = uracil
  modified_base 145: mod_base = OTHER; note = uracil
  modified_base 153: mod_base = OTHER; note = uracil
  modified_base 157: mod_base = OTHER; note = uracil
  modified_base 168..169: mod_base = OTHER; note = uracil
  modified_base 174: mod_base = OTHER; note = uracil
  modified_base 176: mod_base = OTHER; note = uracil
  modified_base 180: mod_base = OTHER; note = uracil
  modified_base 182: mod_base = OTHER; note = uracil
  modified_base 186: mod_base = OTHER; note = uracil
  modified_base 190..192: mod_base = OTHER; note = uracil
  modified_base 196: mod_base = OTHER; note = uracil
  modified_base 198..199: mod_base = OTHER; note = uracil
  modified_base 203: mod_base = OTHER; note = uracil
  modified_base 207: mod_base = OTHER; note = uracil
  modified_base 214: mod_base = OTHER; note = uracil
  modified_base 219..220: mod_base = OTHER; note = uracil
  modified_base 226: mod_base = OTHER; note = uracil
  modified_base 229..233: mod_base = OTHER; note = uracil
  modified_base 235..236: mod_base = OTHER; note = uracil
  modified_base 239..243: mod_base = OTHER; note = uracil
  modified_base 246..249: mod_base = OTHER; note = uracil
  modified_base 254..257: mod_base = OTHER; note = uracil
  modified_base 262..264: mod_base = OTHER; note = uracil
  modified_base 268: mod_base = OTHER; note = uracil
  modified_base 270..271: mod_base = OTHER; note = uracil
  modified_base 275: mod_base = OTHER; note = uracil
  modified_base 280..281: mod_base = OTHER; note = uracil
  modified_base 288..289: mod_base = OTHER; note = uracil
  modified_base 291: mod_base = OTHER; note = uracil
  modified_base 3: mod_base = m5c
  modified_base 12: mod_base = m5c
  modified_base 27: mod_base = m5c
  modified_base 59: mod_base = m5c
  modified_base 90: mod_base = m5c
  modified_base 98: mod_base = m5c
  modified_base 129: mod_base = m5c
  modified_base 204: mod_base = m5c
  modified_base 208: mod_base = m5c
  modified_base 222: mod_base = m5c
  modified_base 237: mod_base = m5c
  modified_base 250: mod_base = m5c
  modified_base 252: mod_base = m5c
  modified_base 258: mod_base = m5c
  modified_base 260: mod_base = m5c
  modified_base 265: mod_base = m5c
  modified_base 272: mod_base = m5c
  variation 151: note = CpG site, residue is C if methylated or T(=U) if unmethylated
ttcgtaagtttcgtttttttaggtttcgttttttttttttgtagagagtggttaagttcgtgttttagaggttgaatgaggattttgtgcggaagttcgattatgttttgagttttgtgggtaagattcggagatattggaagatagagaygtagataggaaagaggttaagatattgatatagatagatttatgtatttgatcggtcgaagatagagtttcggatagtttttattcgtttttagttttcgcgttttcgcgtttcgattttcggtaaggtttgggagtttttgagggtta

SEQ ID NO: 412 - DNA, 300 bp, synthetic construct
  source 1..300: mol_type = other DNA
  modified_base 4..6: mod_base = OTHER; note = uracil
  modified_base 8: mod_base = OTHER; note = uracil
  modified_base 14: mod_base = OTHER; note = uracil
  modified_base 16..18: mod_base = OTHER; note = uracil
  modified_base 22..23: mod_base = OTHER; note = uracil
  modified_base 27: mod_base = OTHER; note = uracil
  modified_base 56: mod_base = OTHER; note = uracil
  modified_base 73: mod_base = OTHER; note = uracil
  modified_base 77: mod_base = OTHER; note = uracil
  modified_base 83: mod_base = OTHER; note = uracil
  modified_base 85: mod_base = OTHER; note = uracil
  modified_base 89: mod_base = OTHER; note = uracil
  modified_base 95: mod_base = OTHER; note = uracil
  modified_base 100: mod_base = OTHER; note = uracil
  modified_base 106: mod_base = OTHER; note = uracil
  modified_base 113: mod_base = OTHER; note = uracil
  modified_base 117: mod_base = OTHER; note = uracil
  modified_base 123: mod_base = OTHER; note = uracil
  modified_base 129: mod_base = OTHER; note = uracil
  modified_base 134..135: mod_base = OTHER; note = uracil
  modified_base 137: mod_base = OTHER; note = uracil
  modified_base 141..142: mod_base = OTHER; note = uracil
  modified_base 146: mod_base = OTHER; note = uracil
  modified_base 152: mod_base = OTHER; note = uracil
  modified_base 154: mod_base = OTHER; note = uracil
  modified_base 158: mod_base = OTHER; note = uracil
  modified_base 161..162: mod_base = OTHER; note = uracil
  modified_base 168: mod_base = OTHER; note = uracil
  modified_base 170: mod_base = OTHER; note = uracil
  modified_base 176: mod_base = OTHER; note = uracil
  modified_base 180..182: mod_base = OTHER; note = uracil
  modified_base 184: mod_base = OTHER; note = uracil
  modified_base 189: mod_base = OTHER; note = uracil
  modified_base 191: mod_base = OTHER; note = uracil
  modified_base 196: mod_base = OTHER; note = uracil
  modified_base 206: mod_base = OTHER; note = uracil
  modified_base 209: mod_base = OTHER; note = uracil
  modified_base 212: mod_base = OTHER; note = uracil
  modified_base 214: mod_base = OTHER; note = uracil
  modified_base 220..221: mod_base = OTHER; note = uracil
  modified_base 223: mod_base = OTHER; note = uracil
  modified_base 227: mod_base = OTHER; note = uracil
  modified_base 230..231: mod_base = OTHER; note = uracil
  modified_base 233: mod_base = OTHER; note = uracil
  modified_base 239: mod_base = OTHER; note = uracil
  modified_base 245: mod_base = OTHER; note = uracil
  modified_base 250..251: mod_base = OTHER; note = uracil
  modified_base 253: mod_base = OTHER; note = uracil
  modified_base 255: mod_base = OTHER; note = uracil
  modified_base 257: mod_base = OTHER; note = uracil
  modified_base 260: mod_base = OTHER; note = uracil
  modified_base 278..279: mod_base = OTHER; note = uracil
  modified_base 293: mod_base = OTHER; note = uracil
  modified_base 28: mod_base = m5c
  modified_base 35: mod_base = m5c
  modified_base 40: mod_base = m5c
  modified_base 42: mod_base = m5c
  modified_base 48: mod_base = m5c
  modified_base 50: mod_base = m5c
  modified_base 63: mod_base = m5c
  modified_base 78: mod_base = m5c
  modified_base 92: mod_base = m5c
  modified_base 96: mod_base = m5c
  modified_base 171: mod_base = m5c
  modified_base 202: mod_base = m5c
  modified_base 210: mod_base = m5c
  modified_base 241: mod_base = m5c
  modified_base 273: mod_base = m5c
  modified_base 288: mod_base = m5c
  modified_base 297: mod_base = m5c
  variation 149: note = CpG site, residue is C if methylated or T(=U) if unmethylated
taatttttagaggtttttaggttttgtcgggagtcggggcgcgggggcgcgggggttgggggcgggtgggggttgttcgaggttttgttttcggtcggttaggtgtatgggtttgtttgtgttagtgttttggttttttttttgtttgygtttttgttttttagtgttttcgggttttatttatagagtttaaagtatagtcgggttttcgtataaaatttttatttagtttttggaatacgagtttggttattttttgtaaggagggagggcgaggtttggaggggcgaggtttgcggg

SEQ ID NO: 413 - DNA, 300 bp, synthetic construct
  source 1..300: mol_type = other DNA
  modified_base 1: mod_base = OTHER; note = uracil
  modified_base 6: mod_base = OTHER; note = uracil
  modified_base 12..13: mod_base = OTHER; note = uracil
  modified_base 15: mod_base = OTHER; note = uracil
  modified_base 19: mod_base = OTHER; note = uracil
  modified_base 24: mod_base = OTHER; note = uracil
  modified_base 36..38: mod_base = OTHER; note = uracil
  modified_base 41: mod_base = OTHER; note = uracil
  modified_base 45..46: mod_base = OTHER; note = uracil
  modified_base 49..50: mod_base = OTHER; note = uracil
  modified_base 55..57: mod_base = OTHER; note = uracil
  modified_base 64: mod_base = OTHER; note = uracil
  modified_base 76: mod_base = OTHER; note = uracil
  modified_base 85: mod_base = OTHER; note = uracil
  modified_base 91: mod_base = OTHER; note = uracil
  modified_base 100: mod_base = OTHER; note = uracil
  modified_base 103: mod_base = OTHER; note = uracil
  modified_base 106: mod_base = OTHER; note = uracil
  modified_base 111: mod_base = OTHER; note = uracil
  modified_base 117: mod_base = OTHER; note = uracil
  modified_base 121: mod_base = OTHER; note = uracil
  modified_base 124: mod_base = OTHER; note = uracil
  modified_base 127: mod_base = OTHER; note = uracil
  modified_base 131: mod_base = OTHER; note = uracil
  modified_base 136: mod_base = OTHER; note = uracil
  modified_base 138: mod_base = OTHER; note = uracil
  modified_base 141: mod_base = OTHER; note = uracil
  modified_base 143: mod_base = OTHER; note = uracil
  modified_base 158: mod_base = OTHER; note = uracil
  modified_base 160: mod_base = OTHER; note = uracil
  modified_base 178..179: mod_base = OTHER; note = uracil
  modified_base 190: mod_base = OTHER; note = uracil
  modified_base 192: mod_base = OTHER; note = uracil
  modified_base 194..196: mod_base = OTHER; note = uracil
  modified_base 198: mod_base = OTHER; note = uracil
  modified_base 203..205: mod_base = OTHER; note = uracil
  modified_base 207: mod_base = OTHER; note = uracil
  modified_base 214: mod_base = OTHER; note = uracil
  modified_base 216..217: mod_base = OTHER; note = uracil
  modified_base 221: mod_base = OTHER; note = uracil
  modified_base 239: mod_base = OTHER; note = uracil
  modified_base 245: mod_base = OTHER; note = uracil
  modified_base 247: mod_base = OTHER; note = uracil
  modified_base 249: mod_base = OTHER; note = uracil
  modified_base 251: mod_base = OTHER; note = uracil
  modified_base 266: mod_base = OTHER; note = uracil
  modified_base 291: mod_base = OTHER; note = uracil
  modified_base 297..299: mod_base = OTHER; note = uracil
  modified_base 25: mod_base = m5c
  modified_base 53: mod_base = m5c
  modified_base 180: mod_base = m5c
  modified_base 200: mod_base = m5c
  modified_base 225: mod_base = m5c
  variation 151: note = CpG site, residue is C if methylated or T(=U) if unmethylated
tagattagggtttttagatttgttcggagggagggttttgtatatttgttaacgttttgtttgttgggaaaggggttgatgttgtaatgataggttaaatagtaataggatattgattggtatttgtaagttgagtttagtttagagaggygaggagtataggggagggaggaaaatttcggtgtggattttatttatacggtttattgggtgtttttggtagacggaattatgggtgtttttatttttttattttaaaaatgtgttttttatgtgtattgtaaaagtaatagattttta

SEQ ID NO: 414 - DNA, 300 bp, synthetic construct
  source 1..300: mol_type = other DNA
  modified_base 8: mod_base = OTHER; note = uracil
  modified_base 14: mod_base = OTHER; note = uracil
  modified_base 20: mod_base = OTHER; note = uracil
  modified_base 25: mod_base = OTHER; note = uracil
  modified_base 27: mod_base = OTHER; note = uracil
  modified_base 36: mod_base = OTHER; note = uracil
  modified_base 38: mod_base = OTHER; note = uracil
  modified_base 63: mod_base = OTHER; note = uracil
  modified_base 65..67: mod_base = OTHER; note = uracil
  modified_base 74: mod_base = OTHER; note = uracil
  modified_base 78: mod_base = OTHER; note = uracil
  modified_base 81..82: mod_base = OTHER; note = uracil
  modified_base 88: mod_base = OTHER; note = uracil
  modified_base 90..92: mod_base = OTHER; note = uracil
  modified_base 99: mod_base = OTHER; note = uracil
  modified_base 114..115: mod_base = OTHER; note = uracil
  modified_base 117: mod_base = OTHER; note = uracil
  modified_base 119: mod_base = OTHER; note = uracil
  modified_base 129..130: mod_base = OTHER; note = uracil
  modified_base 132..134: mod_base = OTHER; note = uracil
  modified_base 136..139: mod_base = OTHER; note = uracil
  modified_base 144: mod_base = OTHER; note = uracil
  modified_base 146..147: mod_base = OTHER; note = uracil
  modified_base 151..152: mod_base = OTHER; note = uracil
  modified_base 154: mod_base = OTHER; note = uracil
  modified_base 156: mod_base = OTHER; note = uracil
  modified_base 161: mod_base = OTHER; note = uracil
  modified_base 166: mod_base = OTHER; note = uracil
  modified_base 168: mod_base = OTHER; note = uracil
  modified_base 171: mod_base = OTHER; note = uracil
  modified_base 175: mod_base = OTHER; note = uracil
  modified_base 181..182: mod_base = OTHER; note = uracil
  modified_base 186: mod_base = OTHER; note = uracil
  modified_base 192..193: mod_base = OTHER; note = uracil
  modified_base 199: mod_base = OTHER; note = uracil
  modified_base 207..208: mod_base = OTHER; note = uracil
  modified_base 212: mod_base = OTHER; note = uracil
  modified_base 217: mod_base = OTHER; note = uracil
  modified_base 220: mod_base = OTHER; note = uracil
  modified_base 223: mod_base = OTHER; note = uracil
  modified_base 226..229: mod_base = OTHER; note = uracil
  modified_base 233..235: mod_base = OTHER; note = uracil
  modified_base 238: mod_base = OTHER; note = uracil
  modified_base 242: mod_base = OTHER; note = uracil
  modified_base 253: mod_base = OTHER; note = uracil
  modified_base 261: mod_base = OTHER; note = uracil
  modified_base 266..268: mod_base = OTHER; note = uracil
  modified_base 270..272: mod_base = OTHER; note = uracil
  modified_base 274: mod_base = OTHER; note = uracil
  modified_base 279: mod_base = OTHER; note = uracil
  modified_base 284: mod_base = OTHER; note = uracil
  modified_base 291..293: mod_base = OTHER; note = uracil
  modified_base 298: mod_base = OTHER; note = uracil
  modified_base 75: mod_base = m5c
  modified_base 100: mod_base = m5c
  modified_base 120: mod_base = m5c
  modified_base 247: mod_base = m5c
  modified_base 275: mod_base = m5c
  variation 149: note = CpG site, residue is C if methylated or T(=U) if unmethylated
tgggaatttgttatttttataatatatataaaaagtatatttttaaaatgagagagtaaaagtatttataatttcgtttgttaggagtatttagtgggtcgtgtgggtgagatttatatcgggattttttttttttttttgtgtttttygtttttttgagttgagtttagtttgtagatgttagttaatgttttgttgttgtttaatttgttattgtaatattagttttttttttagtaaatagggcgttggtaggtatgtagggtttttttttcggataagtttgaggattttgatttg

SEQ ID NO: 415 - DNA, 300 bp, synthetic construct
  source 1..300: mol_type = other DNA
  modified_base 1: mod_base = OTHER; note = uracil
  modified_base 3: mod_base = OTHER; note = uracil
  modified_base 8: mod_base = OTHER; note = uracil
  modified_base 10: mod_base = OTHER; note = uracil
  modified_base 17: mod_base = OTHER; note = uracil
  modified_base 23: mod_base = OTHER; note = uracil
  modified_base 30: mod_base = OTHER; note = uracil
  modified_base 33..34: mod_base = OTHER; note = uracil
  modified_base 37..38: mod_base = OTHER; note = uracil
  modified_base 40: mod_base = OTHER; note = uracil
  modified_base 42: mod_base = OTHER; note = uracil
  modified_base 44..45: mod_base = OTHER; note = uracil
  modified_base 52..53: mod_base = OTHER; note = uracil
  modified_base 61..63: mod_base = OTHER; note = uracil
  modified_base 69..70: mod_base = OTHER; note = uracil
  modified_base 72..73: mod_base = OTHER; note = uracil
  modified_base 80: mod_base = OTHER; note = uracil
  modified_base 83: mod_base = OTHER; note = uracil
  modified_base 88..89: mod_base = OTHER; note = uracil
  modified_base 93..94: mod_base = OTHER; note = uracil
  modified_base 96..98: mod_base = OTHER; note = uracil
  modified_base 100: mod_base = OTHER; note = uracil
  modified_base 125..127: mod_base = OTHER; note = uracil
  modified_base 133: mod_base = OTHER; note = uracil
  modified_base 141: mod_base = OTHER; note = uracil
  modified_base 146: mod_base = OTHER; note = uracil
  modified_base 154..156: mod_base = OTHER; note = uracil
  modified_base 162: mod_base = OTHER; note = uracil
  modified_base 165: mod_base = OTHER; note = uracil
  modified_base 167: mod_base = OTHER; note = uracil
  modified_base 171: mod_base = OTHER; note = uracil
  modified_base 176: mod_base = OTHER; note = uracil
  modified_base 186: mod_base = OTHER; note = uracil
  modified_base 193: mod_base = OTHER; note = uracil
  modified_base 195..196: mod_base = OTHER; note = uracil
  modified_base 203: mod_base = OTHER; note = uracil
  modified_base 207: mod_base = OTHER; note = uracil
  modified_base 212: mod_base = OTHER; note = uracil
  modified_base 216: mod_base = OTHER; note = uracil
  modified_base 218: mod_base = OTHER; note = uracil
  modified_base 223..224: mod_base = OTHER; note = uracil
  modified_base 231..233: mod_base = OTHER; note = uracil
  modified_base 235: mod_base = OTHER; note = uracil
  modified_base 238: mod_base = OTHER; note = uracil
  modified_base 242: mod_base = OTHER; note = uracil
  modified_base 247: mod_base = OTHER; note = uracil
  modified_base 261..262: mod_base = OTHER; note = uracil
  modified_base 270: mod_base = OTHER; note = uracil
  modified_base 277: mod_base = OTHER; note = uracil
  modified_base 282: mod_base = OTHER; note = uracil
  modified_base 286: mod_base = OTHER; note = uracil
  modified_base 288: mod_base = OTHER; note = uracil
  modified_base 292..293: mod_base = OTHER; note = uracil
  modified_base 300: mod_base = OTHER; note = uracil
  modified_base 12: mod_base = m5c
  modified_base 119: mod_base = m5c
  modified_base 142: mod_base = m5c
  modified_base 180: mod_base = m5c
  modified_base 198: mod_base = m5c
  modified_base 219: mod_base = m5c
  modified_base 225: mod_base = m5c
  modified_base 268: mod_base = m5c
  modified_base 297: mod_base = m5c
  variation 150: note = CpG site, residue is C if methylated or T(=U) if unmethylated
tatttggttttcgtggttgggatagattgtttttttttttttttttgggtgttaggtaggtttagaaattatttgatgttagtaaggtttggttatttattggtggggaggaagtgggcgggtgtttagggatagatgagtcgggtagaygtgttttgaggtagtatagttagggttgacgtgggtattatgtatttcggggtttttagagttggtttcggtttcgtttgtttatattaagtaggttagagtggagagggttaggggcgttggggttaaggtatgtattgattaggcgtt

SEQ ID NO: 416 - DNA, 300 bp, synthetic construct
  source 1..300: mol_type = other DNA
  modified_base 5..6: mod_base = OTHER; note = uracil
  modified_base 11: mod_base = OTHER; note = uracil
  modified_base 16: mod_base = OTHER; note = uracil
  modified_base 20..21: mod_base = OTHER; note = uracil
  modified_base 26..29: mod_base = OTHER; note = uracil
  modified_base 34..37: mod_base = OTHER; note = uracil
  modified_base 41..43: mod_base = OTHER; note = uracil
  modified_base 45: mod_base = OTHER; note = uracil
  modified_base 47..48: mod_base = OTHER; note = uracil
  modified_base 50: mod_base = OTHER; note = uracil
  modified_base 52: mod_base = OTHER; note = uracil
  modified_base 56..57: mod_base = OTHER; note = uracil
  modified_base 60: mod_base = OTHER; note = uracil
  modified_base 71: mod_base = OTHER; note = uracil
  modified_base 80: mod_base = OTHER; note = uracil
  modified_base 86..87: mod_base = OTHER; note = uracil
  modified_base 90: mod_base = OTHER; note = uracil
  modified_base 92: mod_base = OTHER; note = uracil
  modified_base 99..101: mod_base = OTHER; note = uracil
  modified_base 109: mod_base = OTHER; note = uracil
  modified_base 116..118: mod_base = OTHER; note = uracil
  modified_base 123: mod_base = OTHER; note = uracil
  modified_base 126..128: mod_base = OTHER; note = uracil
  modified_base 132: mod_base = OTHER; note = uracil
  modified_base 137: mod_base = OTHER; note = uracil
  modified_base 140..141: mod_base = OTHER; note = uracil
  modified_base 143: mod_base = OTHER; note = uracil
  modified_base 148: mod_base = OTHER; note = uracil
  modified_base 153: mod_base = OTHER; note = uracil
  modified_base 156..157: mod_base = OTHER; note = uracil
  modified_base 161: mod_base = OTHER; note = uracil
  modified_base 163: mod_base = OTHER; note = uracil
  modified_base 166: mod_base = OTHER; note = uracil
  modified_base 170..172: mod_base = OTHER; note = uracil
  modified_base 177: mod_base = OTHER; note = uracil
  modified_base 179..180: mod_base = OTHER; note = uracil
  modified_base 183..185: mod_base = OTHER; note = uracil
  modified_base 187: mod_base = OTHER; note = uracil
  modified_base 190..191: mod_base = OTHER; note = uracil
  modified_base 193..196: mod_base = OTHER; note = uracil
  modified_base 198..199: mod_base = OTHER; note = uracil
  modified_base 209..210: mod_base = OTHER; note = uracil
  modified_base 214..215: mod_base = OTHER; note = uracil
  modified_base 219: mod_base = OTHER; note = uracil
  modified_base 223: mod_base = OTHER; note = uracil
  modified_base 226: mod_base = OTHER; note = uracil
  modified_base 236: mod_base = OTHER; note = uracil
  modified_base 241..242: mod_base = OTHER; note = uracil
  modified_base 245..246: mod_base = OTHER; note = uracil
  modified_base 250: mod_base = OTHER; note = uracil
  modified_base 252..254: mod_base = OTHER; note = uracil
  modified_base 272: mod_base = OTHER; note = uracil
  modified_base 276: mod_base = OTHER; note = uracil
  modified_base 280..282: mod_base = OTHER; note = uracil
  modified_base 285..286: mod_base = OTHER; note = uracil
  modified_base 294..295: mod_base = OTHER; note = uracil
  modified_base 3: mod_base = m5c
  modified_base 32: mod_base = m5c
  modified_base 75: mod_base = m5c
  modified_base 81: mod_base = m5c
  modified_base 102: mod_base = m5c
  modified_base 120: mod_base = m5c
  modified_base 158: mod_base = m5c
  modified_base 181: mod_base = m5c
  modified_base 288: mod_base = m5c
  variation 150: note = CpG site, residue is C if methylated or T(=U) if unmethylated
gacgtttggttagtgtatgttttgattttagcgtttttggttttttttattttgatttgtttgatgtgggtaaacgggatcggagttagttttgaaagtttcgaggtgtataatgtttacgttagttttgattgtgttgttttagggtaygtttgttcggtttatttgtttttgggtattcgtttattttttttttattagtgggtggttaggttttgttgatattaggtggtttttgggtttatttggtatttaggagagaggaaggaagtaatttgttttagttacgagagttaagtg

SEQ ID NO: 417 - DNA, 300 bp, synthetic construct
  source 1..300: mol_type = other DNA
  modified_base 3..4: mod_base = OTHER; note = uracil
  modified_base 6: mod_base = OTHER; note = uracil
  modified_base 8: mod_base = OTHER; note = uracil
  modified_base 14: mod_base = OTHER; note = uracil
  modified_base 18: mod_base = OTHER; note = uracil
  modified_base 22: mod_base = OTHER; note = uracil
  modified_base 25..26: mod_base = OTHER; note = uracil
  modified_base 31..32: mod_base = OTHER; note = uracil
  modified_base 46: mod_base = OTHER; note = uracil
  modified_base 53..54: mod_base = OTHER; note = uracil
  modified_base 62..63: mod_base = OTHER; note = uracil
  modified_base 67: mod_base = OTHER; note = uracil
  modified_base 70: mod_base = OTHER; note = uracil
  modified_base 74..75: mod_base = OTHER; note = uracil
  modified_base 80..81: mod_base = OTHER; note = uracil
  modified_base 84..86: mod_base = OTHER; note = uracil
  modified_base 89..90: mod_base = OTHER; note = uracil
  modified_base 92: mod_base = OTHER; note = uracil
  modified_base 95..96: mod_base = OTHER; note = uracil
  modified_base 100: mod_base = OTHER; note = uracil
  modified_base 102..105: mod_base = OTHER; note = uracil
  modified_base 108..110: mod_base = OTHER; note = uracil
  modified_base 113..114: mod_base = OTHER; note = uracil
  modified_base 119..120: mod_base = OTHER; note = uracil
  modified_base 123: mod_base = OTHER; note = uracil
  modified_base 127..128: mod_base = OTHER; note = uracil
  modified_base 130..132: mod_base = OTHER; note = uracil
  modified_base 136: mod_base = OTHER; note = uracil
  modified_base 139..142: mod_base = OTHER; note = uracil
  modified_base 144..145: mod_base = OTHER; note = uracil
  modified_base 147: mod_base = OTHER; note = uracil
  modified_base 157: mod_base = OTHER; note = uracil
  modified_base 159: mod_base = OTHER; note = uracil
  modified_base 163: mod_base = OTHER; note = uracil
  modified_base 169..170: mod_base = OTHER; note = uracil
  modified_base 182: mod_base = OTHER; note = uracil
  modified_base 186: mod_base = OTHER; note = uracil
  modified_base 192: mod_base = OTHER; note = uracil
  modified_base 195: mod_base = OTHER; note = uracil
  modified_base 197: mod_base = OTHER; note = uracil
  modified_base 199: mod_base = OTHER; note = uracil
  modified_base 203..205: mod_base = OTHER; note = uracil
  modified_base 214: mod_base = OTHER; note = uracil
  modified_base 219: mod_base = OTHER; note = uracil
  modified_base 229: mod_base = OTHER; note = uracil
  modified_base 231..233: mod_base = OTHER; note = uracil
  modified_base 235: mod_base = OTHER; note = uracil
  modified_base 237..239: mod_base = OTHER; note = uracil
  modified_base 248: mod_base = OTHER; note = uracil
  modified_base 258: mod_base = OTHER; note = uracil
  modified_base 261..262: mod_base = OTHER; note = uracil
  modified_base 264: mod_base = OTHER; note = uracil
  modified_base 266: mod_base = OTHER; note = uracil
  modified_base 268: mod_base = OTHER; note = uracil
  modified_base 272: mod_base = OTHER; note = uracil
  modified_base 276: mod_base = OTHER; note = uracil
  modified_base 278: mod_base = OTHER; note = uracil
  modified_base 291: mod_base = OTHER; note = uracil
  modified_base 48: mod_base = m5c
  modified_base 124: mod_base = m5c
  modified_base 183: mod_base = m5c
  modified_base 241: mod_base = m5c
  modified_base 243: mod_base = m5c
  variation 149: note = CpG site, residue is C if methylated or T(=U) if unmethylated
atttatatttgaatatatagatatttttttttagggtgtgttgtgttcgatatttttaatttttgtttgtattttagggtttgtttagtttttttttggttttttagtttagtttggttttttcggtttttttgttatttttatttttygtgtgtgtataagtagggattaggtagggagatcggtagatgttgttttttgtttttggggtttttttttttagtgttgtttttatatttacgcgatgttttaattaattgttatatttaggtttttttagtggggagagttagaaataga

SEQ ID NO: 418 - DNA, 300 bp, synthetic construct
  source 1..300: mol_type = other DNA
  modified_base 1: mod_base = OTHER; note = uracil
  modified_base 7: mod_base = OTHER; note = uracil
  modified_base 11: mod_base = OTHER; note = uracil
  modified_base 13: mod_base = OTHER; note = uracil
  modified_base 15..18: mod_base = OTHER; note = uracil
  modified_base 20: mod_base = OTHER; note = uracil
  modified_base 29..30: mod_base = OTHER; note = uracil
  modified_base 40: mod_base = OTHER; note = uracil
  modified_base 53: mod_base = OTHER; note = uracil
  modified_base 72: mod_base = OTHER; note = uracil
  modified_base 75: mod_base = OTHER; note = uracil
  modified_base 77: mod_base = OTHER; note = uracil
  modified_base 90..93: mod_base = OTHER; note = uracil
  modified_base 99: mod_base = OTHER; note = uracil
  modified_base 106: mod_base = OTHER; note = uracil
  modified_base 109: mod_base = OTHER; note = uracil
  modified_base 112: mod_base = OTHER; note = uracil
  modified_base 115: mod_base = OTHER; note = uracil
  modified_base 120: mod_base = OTHER; note = uracil
  modified_base 122..124: mod_base = OTHER; note = uracil
  modified_base 127..128: mod_base = OTHER; note = uracil
  modified_base 133..135: mod_base = OTHER; note = uracil
  modified_base 138: mod_base = OTHER; note = uracil
  modified_base 144: mod_base = OTHER; note = uracil
  modified_base 146: mod_base = OTHER; note = uracil
  modified_base 148: mod_base = OTHER; note = uracil
  modified_base 166: mod_base = OTHER; note = uracil
  modified_base 174: mod_base = OTHER; note = uracil
  modified_base 183..184: mod_base = OTHER; note = uracil
  modified_base 188: mod_base = OTHER; note = uracil
  modified_base 193: mod_base = OTHER; note = uracil
  modified_base 201..202: mod_base = OTHER; note = uracil
  modified_base 212: mod_base = OTHER; note = uracil
  modified_base 217: mod_base = OTHER; note = uracil
  modified_base 221..223: mod_base = OTHER; note = uracil
  modified_base 231: mod_base = OTHER; note = uracil
  modified_base 235: mod_base = OTHER; note = uracil
  modified_base 255: mod_base = OTHER; note = uracil
  modified_base 257: mod_base = OTHER; note = uracil
  modified_base 260: mod_base = OTHER; note = uracil
  modified_base 262: mod_base = OTHER; note = uracil
  modified_base 264..266: mod_base = OTHER; note = uracil
  modified_base 280: mod_base = OTHER; note = uracil
  modified_base 289: mod_base = OTHER; note = uracil
  modified_base 56: mod_base = m5c
  modified_base 58: mod_base = m5c
  modified_base 116: mod_base = m5c
  modified_base 175: mod_base = m5c
  modified_base 251: mod_base = m5c
  variation 150: note = CpG site, residue is C if methylated or T(=U) if unmethylated
ttatttttgattttttttattgagaaagtttgagtgtggtagttaattaaagtatcgcgtgggtgtgggagtaatattaagaaaagaaattttagggatagagagtagtatttgtcggtttttttatttggtttttgtttgtgtatataygagaggtggggatgatagggaggtcggaaggattaggttgggttggggagttaggaagaggttgggtaggttttggaatgtagataggaattaaaggtatcgagtataatatattttggaaaaggatgtttgtatgtttaagtgtggatg

SEQ ID NO: 419 - DNA, 300 bp, synthetic construct
  source 1..300: mol_type = other DNA
  modified_base 2..4: mod_base = OTHER; note = uracil
  modified_base 7..8: mod_base = OTHER; note = uracil
  modified_base 10: mod_base = OTHER; note = uracil
  modified_base 12: mod_base = OTHER; note = uracil
  modified_base 15: mod_base = OTHER; note = uracil
  modified_base 19: mod_base = OTHER; note = uracil
  modified_base 21: mod_base = OTHER; note = uracil
  modified_base 23..24: mod_base = OTHER; note = uracil
  modified_base 28..30: mod_base = OTHER; note = uracil
  modified_base 40: mod_base = OTHER; note = uracil
  modified_base 43..44: mod_base = OTHER; note = uracil
  modified_base 46: mod_base = OTHER; note = uracil
  modified_base 49: mod_base = OTHER; note = uracil
  modified_base 54..56: mod_base = OTHER; note = uracil
  modified_base 59: mod_base = OTHER; note = uracil
  modified_base 61..63: mod_base = OTHER; note = uracil
  modified_base 68..69: mod_base = OTHER; note = uracil
  modified_base 71: mod_base = OTHER; note = uracil
  modified_base 73..75: mod_base = OTHER; note = uracil
  modified_base 78: mod_base = OTHER; note = uracil
  modified_base 81: mod_base = OTHER; note = uracil
  modified_base 84..86: mod_base = OTHER; note = uracil
  modified_base 88: mod_base = OTHER; note = uracil
  modified_base 90: mod_base = OTHER; note = uracil
  modified_base 93: mod_base = OTHER; note = uracil
  modified_base 97: mod_base = OTHER; note = uracil
  modified_base 100: mod_base = OTHER; note = uracil
  modified_base 106..107: mod_base = OTHER; note = uracil
  modified_base 109: mod_base = OTHER; note = uracil
  modified_base 115: mod_base = OTHER; note = uracil
  modified_base 129: mod_base = OTHER; note = uracil
  modified_base 132: mod_base = OTHER; note = uracil
  modified_base 136: mod_base = OTHER; note = uracil
  modified_base 139: mod_base = OTHER; note = uracil
  modified_base 146: mod_base = OTHER; note = uracil
  modified_base 152: mod_base = OTHER; note = uracil
  modified_base 154: mod_base = OTHER; note = uracil
  modified_base 158..160: mod_base = OTHER; note = uracil
  modified_base 162..163: mod_base = OTHER; note = uracil
  modified_base 165: mod_base = OTHER; note = uracil
  modified_base 171..172: mod_base = OTHER; note = uracil
  modified_base 178: mod_base = OTHER; note = uracil
  modified_base 180..181: mod_base = OTHER; note = uracil
  modified_base 184..185: mod_base = OTHER; note = uracil
  modified_base 188: mod_base = OTHER; note = uracil
  modified_base 191..192: mod_base = OTHER; note = uracil
  modified_base 197..199: mod_base = OTHER; note = uracil
  modified_base 208..209: mod_base = OTHER; note = uracil
  modified_base 211: mod_base = OTHER; note = uracil
  modified_base 213: mod_base = OTHER; note = uracil
  modified_base 215: mod_base = OTHER; note = uracil
  modified_base 217..219: mod_base = OTHER; note = uracil
  modified_base 225: mod_base = OTHER; note = uracil
  modified_base 227..229: mod_base = OTHER; note = uracil
  modified_base 235..236: mod_base = OTHER; note = uracil
  modified_base 243: mod_base = OTHER; note = uracil
  modified_base 245: mod_base = OTHER; note = uracil
  modified_base 249: mod_base = OTHER; note = uracil
  modified_base 257: mod_base = OTHER; note = uracil
  modified_base 260: mod_base = OTHER; note = uracil
  modified_base 266: mod_base = OTHER; note = uracil
  modified_base 273: mod_base = OTHER; note = uracil
  modified_base 284: mod_base = OTHER; note = uracil
  modified_base 289: mod_base = OTHER; note = uracil
  modified_base 294: mod_base = OTHER; note = uracil
  modified_base 296: mod_base = OTHER; note = uracil
  modified_base 299: mod_base = OTHER; note = uracil
  modified_base 13: mod_base = m5c
  modified_base 64: mod_base = m5c
  modified_base 200: mod_base = m5c
  modified_base 232: mod_base = m5c
  modified_base 250: mod_base = m5c
  modified_base 278: mod_base = m5c
  variation 125: note = CpG site, residue is C if methylated or T(=U) if unmethylated
  variation 149: note = CpG site, residue is C if methylated or T(=U) if unmethylated
ttttagttatttcgtagttatttttgatttagaaaagaataattatagttgggtttagtatttcgggttattttttgtagttgtttatatatttggtagttgggtttatttatgtaatgtggatygggttttttatatttgaaatttgygtttttattttttttttgagattagtgttttttgttagtttttatggtttcgggatgattttatttttttagggtttttttgcgttttgggagttttggtcgaggagtagtaggggttgatggtagagcgggggtaggttagagtttagta

SEQ ID NO: 420 - DNA, 300 bp, synthetic construct
  source 1..300: mol_type = other DNA
  modified_base 2: mod_base = OTHER; note = uracil
  modified_base 7: mod_base = OTHER; note = uracil
  modified_base 9: mod_base = OTHER; note = uracil
  modified_base 13..14: mod_base = OTHER; note = uracil
  modified_base 17..20: mod_base = OTHER; note = uracil
  modified_base 23: mod_base = OTHER; note = uracil
  modified_base 25: mod_base = OTHER; note = uracil
  modified_base 28..29: mod_base = OTHER; note = uracil
  modified_base 32: mod_base = OTHER; note = uracil
  modified_base 35..38: mod_base = OTHER; note = uracil
  modified_base 41: mod_base = OTHER; note = uracil
  modified_base 44: mod_base = OTHER; note = uracil
  modified_base 46..47: mod_base = OTHER; note = uracil
  modified_base 52..53: mod_base = OTHER; note = uracil
  modified_base 58: mod_base = OTHER; note = uracil
  modified_base 60..62: mod_base = OTHER; note = uracil
  modified_base 69: mod_base = OTHER; note = uracil
  modified_base 77..79: mod_base = OTHER; note = uracil
  modified_base 94: mod_base = OTHER; note = uracil
  modified_base 97..98: mod_base = OTHER; note = uracil
  modified_base 104..105: mod_base = OTHER; note = uracil
  modified_base 113: mod_base = OTHER; note = uracil
  modified_base 117: mod_base = OTHER; note = uracil
  modified_base 124: mod_base = OTHER; note = uracil
  modified_base 126: mod_base = OTHER; note = uracil
  modified_base 131: mod_base = OTHER; note = uracil
  modified_base 133: mod_base = OTHER; note = uracil
  modified_base 152: mod_base = OTHER; note = uracil
  modified_base 159: mod_base = OTHER; note = uracil
  modified_base 172..173: mod_base = OTHER; note = uracil
  modified_base 178..179: mod_base = OTHER; note = uracil
  modified_base 181: mod_base = OTHER; note = uracil
  modified_base 186: mod_base = OTHER; note = uracil
  modified_base 196..198: mod_base = OTHER; note = uracil
  modified_base 201: mod_base = OTHER; note = uracil
  modified_base 204..205: mod_base = OTHER; note = uracil
  modified_base 217: mod_base = OTHER; note = uracil
  modified_base 220: mod_base = OTHER; note = uracil
  modified_base 223: mod_base = OTHER; note = uracil
  modified_base 233..234: mod_base = OTHER; note = uracil
  modified_base 242: mod_base = OTHER; note = uracil
  modified_base 247..249: mod_base = OTHER; note = uracil
  modified_base 252: mod_base = OTHER; note = uracil
  modified_base 263: mod_base = OTHER; note = uracil
  modified_base 268: mod_base = OTHER; note = uracil
  modified_base 274: mod_base = OTHER; note = uracil
  modified_base 283: mod_base = OTHER; note = uracil
  modified_base 294: mod_base = OTHER; note = uracil
  modified_base 300: mod_base = OTHER; note = uracil
  modified_base 21: mod_base = m5c
  modified_base 49: mod_base = m5c
  modified_base 67: mod_base = m5c
  modified_base 99: mod_base = m5c
  modified_base 235: mod_base = m5c
  modified_base 286: mod_base = m5c
  variation 150: note = CpG site, residue is C if methylated or T(=U) if unmethylated
  variation 174: note = CpG site, residue is C if methylated or T(=U) if unmethylated
gttgagttttgatttgttttcgttttgttattagtttttgttgtttttcggttagagtttttaggacgtagggagattttgggagagtgaggttatttcggggttatggaagttggtaggagatattggttttagaggagggatagagaygtagattttagatgtaagaagttygatttatattgtataagtggatttagttgttagatgtgtgggtagttgtagggagtggttcggggtgttgggtttagttgtggttgtttttttttgggttaggagtgattgcggagtggttgggat

SEQ ID NO: 421 - DNA, 300 bp, synthetic construct
  source 1..300: mol_type = other DNA
  modified_base 1..2: mod_base = OTHER; note = uracil
  modified_base 11: mod_base = OTHER; note = uracil
  modified_base 13: mod_base = OTHER; note = uracil
  modified_base 24..27: mod_base = OTHER; note = uracil
  modified_base 29..30: mod_base = OTHER; note = uracil
  modified_base 37: mod_base = OTHER; note = uracil
  modified_base 41: mod_base = OTHER; note = uracil
  modified_base 43: mod_base = OTHER; note = uracil
  modified_base 45: mod_base = OTHER; note = uracil
  modified_base 49: mod_base = OTHER; note = uracil
  modified_base 51..52: mod_base = OTHER; note = uracil
  modified_base 55..57: mod_base = OTHER; note = uracil
  modified_base 60: mod_base = OTHER; note = uracil
  modified_base 65..66: mod_base = OTHER; note = uracil
  modified_base 68..69: mod_base = OTHER; note = uracil
  modified_base 73: mod_base = OTHER; note = uracil
  modified_base 81..82: mod_base = OTHER; note = uracil
  modified_base 89: mod_base = OTHER; note = uracil
  modified_base 91: mod_base = OTHER; note = uracil
  modified_base 93: mod_base = OTHER; note = uracil
  modified_base 100: mod_base = OTHER; note = uracil
  modified_base 102..104: mod_base = OTHER; note = uracil
  modified_base 106: mod_base = OTHER; note = uracil
  modified_base 108..109: mod_base = OTHER; note = uracil
  modified_base 112..113: mod_base = OTHER; note = uracil
  modified_base 118: mod_base = OTHER; note = uracil
  modified_base 120..121: mod_base = OTHER; note = uracil
  modified_base 124: mod_base = OTHER; note = uracil
  modified_base 135: mod_base = OTHER; note = uracil
  modified_base 138..140: mod_base = OTHER; note = uracil
  modified_base 160..161: mod_base = OTHER; note = uracil
  modified_base 170: mod_base = OTHER; note = uracil
  modified_base 173..175: mod_base = OTHER; note = uracil
  modified_base 178: mod_base = OTHER; note = uracil
  modified_base 183..185: mod_base = OTHER; note = uracil
  modified_base 189..190: mod_base = OTHER; note = uracil
  modified_base 195: mod_base = OTHER; note = uracil
  modified_base 197: mod_base = OTHER; note = uracil
  modified_base 202: mod_base = OTHER; note = uracil
  modified_base 215: mod_base = OTHER; note = uracil
  modified_base 220..221: mod_base = OTHER; note = uracil
  modified_base 232: mod_base = OTHER; note = uracil
  modified_base 235: mod_base = OTHER; note = uracil
  modified_base 244..246: mod_base = OTHER; note = uracil
  modified_base 250: mod_base = OTHER; note = uracil
  modified_base 255..256: mod_base = OTHER; note = uracil
  modified_base 262: mod_base = OTHER; note = uracil
  modified_base 267: mod_base = OTHER; note = uracil
  modified_base 273..275: mod_base = OTHER; note = uracil
  modified_base 277..278: mod_base = OTHER; note = uracil
  modified_base 280: mod_base = OTHER; note = uracil
  modified_base 282: mod_base = OTHER; note = uracil
  modified_base 284: mod_base = OTHER; note = uracil
  modified_base 292: mod_base = OTHER; note = uracil
  modified_base 295: mod_base = OTHER; note = uracil
  modified_base 300: mod_base = OTHER; note = uracil
  modified_base 6: mod_base = m5c
  modified_base 8: mod_base = m5c
  modified_base 15: mod_base = m5c
  modified_base 21: mod_base = m5c
  modified_base 31: mod_base = m5c
  modified_base 63: mod_base = m5c
  modified_base 85: mod_base = m5c
  modified_base 157: mod_base = m5c
  modified_base 162: mod_base = m5c
  modified_base 179: mod_base = m5c
  modified_base 209: mod_base = m5c
  modified_base 213: mod_base = m5c
  modified_base 247: mod_base = m5c
  modified_base 258: mod_base = m5c
  modified_base 268: mod_base = m5c
  modified_base 271: mod_base = m5c
  variation 146: note = CpG site, residue is C if methylated or T(=U) if unmethylated
  variation 154: note = CpG site, residue is C if methylated or T(=U) if unmethylated
ttaaacgcggtatacggggacggtttttttcggggttaggtttattggttttttttttttagcgttattaggtaggagggttaacggttatataggaggtatttttatttgtttttgtattagtaaataaagtgtattttattttygtgtgagygtcggttcggtgagttagttttttcgggtttttttttgtttttagggtagggggcgtgcgttgagttagaggtagatttgtagaaagggtttcgattgggtttcgggtagggtcggcgtttattatattttgggggttagttatgt

SEQ ID NO: 422 - DNA, 300 bp, synthetic construct
  source 1..300: mol_type = other DNA
  modified_base 2: mod_base = OTHER; note = uracil
  modified_base 7: mod_base = OTHER; note = uracil
  modified_base 11..15: mod_base = OTHER; note = uracil
  modified_base 31: mod_base = OTHER; note = uracil
  modified_base 35..37: mod_base = OTHER; note = uracil
  modified_base 40..41: mod_base = OTHER; note = uracil
  modified_base 47..49: mod_base = OTHER; note = uracil
  modified_base 58..60: mod_base = OTHER; note = uracil
  modified_base 64: mod_base = OTHER; note = uracil
  modified_base 67: mod_base = OTHER; note = uracil
  modified_base 72: mod_base = OTHER; note = uracil
  modified_base 75..76: mod_base = OTHER; note = uracil
  modified_base 78: mod_base = OTHER; note = uracil
  modified_base 82: mod_base = OTHER; note = uracil
  modified_base 84: mod_base = OTHER; note = uracil
  modified_base 89: mod_base = OTHER; note = uracil
  modified_base 93..97: mod_base = OTHER; note = uracil
  modified_base 100..102: mod_base = OTHER; note = uracil
  modified_base 109: mod_base = OTHER; note = uracil
  modified_base 119..120: mod_base = OTHER; note = uracil
  modified_base 129: mod_base = OTHER; note = uracil
  modified_base 133: mod_base = OTHER; note = uracil
  modified_base 135: mod_base = OTHER; note = uracil
  modified_base 137: mod_base = OTHER; note = uracil
  modified_base 142: mod_base = OTHER; note = uracil
  modified_base 148: mod_base = OTHER; note = uracil
  modified_base 150: mod_base = OTHER; note = uracil
  modified_base 152: mod_base = OTHER; note = uracil
  modified_base 167: mod_base = OTHER; note = uracil
  modified_base 169: mod_base = OTHER; note = uracil
  modified_base 178: mod_base = OTHER; note = uracil
  modified_base 184: mod_base = OTHER; note = uracil
  modified_base 190: mod_base = OTHER; note = uracil
  modified_base 202..203: mod_base = OTHER; note = uracil
  modified_base 205..206: mod_base = OTHER; note = uracil
  modified_base 214: mod_base = OTHER; note = uracil
  modified_base 221..223: mod_base = OTHER; note = uracil
  modified_base 225..226: mod_base = OTHER; note = uracil
  modified_base 229..230: mod_base = OTHER; note = uracil
  modified_base 239: mod_base = OTHER; note = uracil
  modified_base 253..254: mod_base = OTHER; note = uracil
  modified_base 261..262: mod_base = OTHER; note = uracil
  modified_base 266..268: mod_base = OTHER; note = uracil
  modified_base 278: mod_base = OTHER; note = uracil
  modified_base 282..284: mod_base = OTHER; note = uracil
  modified_base 291: mod_base = OTHER; note = uracil
  modified_base 29: mod_base = m5c
  modified_base 32: mod_base = m5c
  modified_base 42: mod_base = m5c
  modified_base 53: mod_base = m5c
  modified_base 87: mod_base = m5c
  modified_base 91: mod_base = m5c
  modified_base 121: mod_base = m5c
  modified_base 138: mod_base = m5c
  modified_base 143: mod_base = m5c
  modified_base 215: mod_base = m5c
  modified_base 237: mod_base = m5c
  modified_base 269: mod_base = m5c
  modified_base 279: mod_base = m5c
  modified_base 285: mod_base = m5c
  modified_base 292: mod_base = m5c
  modified_base 294: mod_base = m5c
  variation 146: note = CpG site, residue is C if methylated or T(=U) if unmethylated
  variation 154: note = CpG site, residue is C if methylated or T(=U) if unmethylated
gtatagttgatttttagagtgtggtgggcgtcggttttgttcgaggtttagtcggggttttttttgtagatttatttttggtttagcgtacgttttttgttttgagaataggaaagggttcggaagggttgatttatcgggtcgaygtttataygaaaatgggatgtattttatttgttggtgtaaaggtaggtgagggtgttttttgtgtgatcgttggtttttttgtttggtggcgttgaagggaaggagttagtgagtttgatttcgggaggggtcgttttcgtgtgtcgcgtttgg

SEQ ID NO: 423 - DNA, 300 bp, synthetic construct
  source 1..300: mol_type = other DNA
  modified_base 2: mod_base = OTHER; note = uracil
  modified_base 11..13: mod_base = OTHER; note = uracil
  modified_base 20: mod_base = OTHER; note = uracil
  modified_base 22..26: mod_base = OTHER; note = uracil
  modified_base 28: mod_base = OTHER; note = uracil
  modified_base 32: mod_base = OTHER; note = uracil
  modified_base 38..39: mod_base = OTHER; note = uracil
  modified_base 42..45: mod_base = OTHER; note = uracil
  modified_base 47: mod_base = OTHER; note = uracil
  modified_base 55..56: mod_base = OTHER; note = uracil
  modified_base 62: mod_base = OTHER; note = uracil
  modified_base 65: mod_base = OTHER; note = uracil
  modified_base 67: mod_base = OTHER; note = uracil
  modified_base 76: mod_base = OTHER; note = uracil
  modified_base 85..86: mod_base = OTHER; note = uracil
  modified_base 112: mod_base = OTHER; note = uracil
  modified_base 116: mod_base = OTHER; note = uracil
  modified_base 118: mod_base = OTHER; note = uracil
  modified_base 124: mod_base = OTHER; note = uracil
  modified_base 126: mod_base = OTHER; note = uracil
  modified_base 129..131: mod_base = OTHER; note = uracil
  modified_base 133: mod_base = OTHER; note = uracil
  modified_base 137: mod_base = OTHER; note = uracil
  modified_base 139: mod_base = OTHER; note = uracil
  modified_base 145: mod_base = OTHER; note = uracil
  modified_base 147: mod_base = OTHER; note = uracil
  modified_base 155..156: mod_base = OTHER; note = uracil
  modified_base 164: mod_base = OTHER; note = uracil
  modified_base 172..173: mod_base = OTHER; note = uracil
  modified_base 180..181: mod_base = OTHER; note = uracil
  modified_base 183: mod_base = OTHER; note = uracil
  modified_base 187: mod_base = OTHER; note = uracil
  modified_base 191: mod_base = OTHER; note = uracil
  modified_base 195..196: mod_base = OTHER; note = uracil
  modified_base 200..204: mod_base = OTHER; note = uracil
  modified_base 206..207: mod_base = OTHER; note = uracil
  modified_base 210: mod_base = OTHER; note = uracil
  modified_base 213: mod_base = OTHER; note = uracil
  modified_base 217: mod_base = OTHER; note = uracil
  modified_base 219..220: mod_base = OTHER; note = uracil
  modified_base 223: mod_base = OTHER; note = uracil
  modified_base 225..227: mod_base = OTHER; note = uracil
  modified_base 229..230: mod_base = OTHER; note = uracil
  modified_base 232..235: mod_base = OTHER; note = uracil
  modified_base 238..240: mod_base = OTHER; note = uracil
  modified_base 242..247: mod_base = OTHER; note = uracil
  modified_base 252: mod_base = OTHER; note = uracil
  modified_base 254..255: mod_base = OTHER; note = uracil
  modified_base 261: mod_base = OTHER; note = uracil
  modified_base 263: mod_base = OTHER; note = uracil
  modified_base 278..279: mod_base = OTHER; note = uracil
  modified_base 281..282: mod_base = OTHER; note = uracil
  modified_base 292..295: mod_base = OTHER; note = uracil
  modified_base 297..299: mod_base = OTHER; note = uracil
  modified_base 17: mod_base = m5c
  modified_base 48: mod_base = m5c
  modified_base 90: mod_base = m5c
  modified_base 113: mod_base = m5c
  modified_base 141: mod_base = m5c
  modified_base 152: mod_base = m5c
  modified_base 157: mod_base = m5c
  modified_base 197: mod_base = m5c
  modified_base 208: mod_base = m5c
  modified_base 236: mod_base = m5c
  modified_base 286: mod_base = m5c
  variation 149: note = CpG site, residue is C if methylated or T(=U) if unmethylated
gtaggaagggtttagacgatatttttatagatatatgttagttttttcgggtgattaaaattattttagtaaaggtagatgaggttaagcgaaaaggggtgggtggaagaatcggttttgagttttagtttatagatattcggatattygtcggttcggtaggtaggggtttttggtggttttaggttgttaggttcggttttttttcgtagttgtttttagtttttatttttttcgtttattttttaggatttttattttattgaggagattaagattatttggcgagaatttttttta

SEQ ID NO: 424 - DNA, 300 bp, synthetic construct
  source 1..300: mol_type = other DNA
  modified_base 11: mod_base = OTHER; note = uracil
  modified_base 15..16: mod_base = OTHER; note = uracil
  modified_base 24: mod_base = OTHER; note = uracil
  modified_base 30: mod_base = OTHER; note = uracil
  modified_base 32..33: mod_base = OTHER; note = uracil
  modified_base 35: mod_base = OTHER; note = uracil
  modified_base 50..51: mod_base = OTHER; note = uracil
  modified_base 78: mod_base = OTHER; note = uracil
  modified_base 85: mod_base = OTHER; note = uracil
  modified_base 88: mod_base = OTHER; note = uracil
  modified_base 101: mod_base = OTHER; note = uracil
  modified_base 106..107: mod_base = OTHER; note = uracil
  modified_base 111: mod_base = OTHER; note = uracil
  modified_base 114..115: mod_base = OTHER; note = uracil
  modified_base 121..122: mod_base = OTHER; note = uracil
  modified_base 124..125: mod_base = OTHER; note = uracil
  modified_base 131..134: mod_base = OTHER; note = uracil
  modified_base 137..138: mod_base = OTHER; note = uracil
  modified_base 141: mod_base = OTHER; note = uracil
  modified_base 146: mod_base = OTHER; note = uracil
  modified_base 157: mod_base = OTHER; note = uracil
  modified_base 165: mod_base = OTHER; note = uracil
  modified_base 172: mod_base = OTHER; note = uracil
  modified_base 178: mod_base = OTHER; note = uracil
  modified_base 180: mod_base = OTHER; note = uracil
  modified_base 185: mod_base = OTHER; note = uracil
  modified_base 191: mod_base = OTHER; note = uracil
  modified_base 194..195: mod_base = OTHER; note = uracil
  modified_base 197..199: mod_base = OTHER; note = uracil
  modified_base 201..204: mod_base = OTHER; note = uracil
  modified_base 211: mod_base = OTHER; note = uracil
  modified_base 216..217: mod_base = OTHER; note = uracil
  modified_base 219: mod_base = OTHER; note = uracil
  modified_base 222: mod_base = OTHER; note = uracil
  modified_base 225..226: mod_base = OTHER; note = uracil
  modified_base 231: mod_base = OTHER; note = uracil
  modified_base 247: mod_base = OTHER; note = uracil
  modified_base 249..250: mod_base = OTHER; note = uracil
  modified_base 259: mod_base = OTHER; note = uracil
  modified_base 263: mod_base = OTHER; note = uracil
  modified_base 270: mod_base = OTHER; note = uracil
  modified_base 285: mod_base = OTHER; note = uracil
  modified_base 290..292: mod_base = OTHER; note = uracil
  modified_base 295..296: mod_base = OTHER; note = uracil
  modified_base 299: mod_base = OTHER; note = uracil
  modified_base 13: mod_base = m5c
  modified_base 63: mod_base = m5c
  modified_base 91: mod_base = m5c
  modified_base 102: mod_base = m5c
  modified_base 142: mod_base = m5c
  modified_base 147: mod_base = m5c
  modified_base 158: mod_base = m5c
  modified_base 186: mod_base = m5c
  modified_base 209: mod_base = m5c
  modified_base 251: mod_base = m5c
  modified_base 282: mod_base = m5c
  variation 150: note = CpG site, residue is C if methylated or T(=U) if unmethylated
gggaggggttttcgttaggtggttttaatttttttagtgaaataggagttttggggggtgggcgggggaggtgggagttggagatagttgcgggagggggtcgggtttgatagtttgaggttattaggaatttttgtttatcgggtcgaygagtgttcgagtgtttgtgggttgagatttagagtcggtttttttatttattttttttcgtttggttttatttgtttttattgagatgattttggttattcggaggggttggtatatgtttgtgggggtgtcgtttgggttttttttgtt

SEQ ID NO: 425 - DNA, 300 bp, synthetic construct
  source 1..300: mol_type = other DNA
  modified_base 10: mod_base = OTHER; note = uracil
  modified_base 25: mod_base = OTHER; note = uracil
  modified_base 32: mod_base = OTHER; note = uracil
  modified_base 46: mod_base = OTHER; note = uracil
  modified_base 49: mod_base = OTHER; note = uracil
  modified_base 74: mod_base = OTHER; note = uracil
  modified_base 92: mod_base = OTHER; note = uracil
  modified_base 94: mod_base = OTHER; note = uracil
  modified_base 97: mod_base = OTHER; note = uracil
  modified_base 102: mod_base = OTHER; note = uracil
  modified_base 110: mod_base = OTHER; note = uracil
  modified_base 114..115: mod_base = OTHER; note = uracil
  modified_base 118: mod_base = OTHER; note = uracil
  modified_base 124..125: mod_base = OTHER; note = uracil
  modified_base 131..132: mod_base = OTHER; note = uracil
  modified_base 137: mod_base = OTHER; note = uracil
  modified_base 142: mod_base = OTHER; note = uracil
  modified_base 144: mod_base = OTHER; note = uracil
  modified_base 153..154: mod_base = OTHER; note = uracil
  modified_base 156: mod_base = OTHER; note = uracil
  modified_base 160: mod_base = OTHER; note = uracil
  modified_base 173: mod_base = OTHER; note = uracil
  modified_base 182: mod_base = OTHER; note = uracil
  modified_base 204: mod_base = OTHER; note = uracil
  modified_base 210..211: mod_base = OTHER; note = uracil
  modified_base 214: mod_base = OTHER; note = uracil
  modified_base 218: mod_base = OTHER; note = uracil
  modified_base 221: mod_base = OTHER; note = uracil
  modified_base 233: mod_base = OTHER; note = uracil
  modified_base 237: mod_base = OTHER; note = uracil
  modified_base 241: mod_base = OTHER; note = uracil
  modified_base 244..245: mod_base = OTHER; note = uracil
  modified_base 247: mod_base = OTHER; note = uracil
  modified_base 249: mod_base = OTHER; note = uracil
  modified_base 252: mod_base = OTHER; note = uracil
  modified_base 255: mod_base = OTHER; note = uracil
  modified_base 257: mod_base = OTHER; note = uracil
  modified_base 261: mod_base = OTHER; note = uracil
  modified_base 264: mod_base = OTHER; note = uracil
  modified_base 276: mod_base = OTHER; note = uracil
  modified_base 287..288: mod_base = OTHER; note = uracil
  modified_base 293..295: mod_base = OTHER; note = uracil
  modified_base 20: mod_base = m5c
  modified_base 53: mod_base = m5c
  modified_base 69: mod_base = m5c
  modified_base 129: mod_base = m5c
  modified_base 138: mod_base = m5c
  modified_base 174: mod_base = m5c
  modified_base 188: mod_base = m5c
  variation 150: note = CpG site, residue is C if methylated or T(=U) if unmethylated
aggtgagatttggaggttgcggggtagttagtaagtgggagagagttgtatgcggggaaggtgggaggcgttgtaggaaaggtgagggagatatagttgagttgtggtgttggttagttggggttttgcgttttattcgggtattgtgayggttattaataggttttaagtatcggaatgatatgatcggatttgtaatttaattagatttttttgattgttgttgggggaatagattgttaattttataatagtattgttagttgagtattagataaatgatgaatttgggtttaggga

SEQ ID NO: 426 - DNA, 300 bp, synthetic construct
  source 1..300: mol_type = other DNA
  modified_base 1..3: mod_base = OTHER; note = uracil
  modified_base 8..10: mod_base = OTHER; note = uracil
  modified_base 16: mod_base = OTHER; note = uracil
  modified_base 19: mod_base = OTHER; note = uracil
  modified_base 26: mod_base = OTHER; note = uracil
  modified_base 32: mod_base = OTHER; note = uracil
  modified_base 34: mod_base = OTHER; note = uracil
  modified_base 37: mod_base = OTHER; note = uracil
  modified_base 41: mod_base = OTHER; note = uracil
  modified_base 46: mod_base = OTHER; note = uracil
  modified_base 61: mod_base = OTHER; note = uracil
  modified_base 65: mod_base = OTHER; note = uracil
  modified_base 70..74: mod_base = OTHER; note = uracil
  modified_base 77: mod_base = OTHER; note = uracil
  modified_base 80: mod_base = OTHER; note = uracil
  modified_base 84: mod_base = OTHER; note = uracil
  modified_base 93: mod_base = OTHER; note = uracil
  modified_base 105: mod_base = OTHER; note = uracil
  modified_base 110: mod_base = OTHER; note = uracil
  modified_base 115: mod_base = OTHER; note = uracil
  modified_base 120: mod_base = OTHER; note = uracil
  modified_base 124: mod_base = OTHER; note = uracil
  modified_base 130: mod_base = OTHER; note = uracil
  modified_base 137..138: mod_base = OTHER; note = uracil
  modified_base 148: mod_base = OTHER; note = uracil
  modified_base 152: mod_base = OTHER; note = uracil
  modified_base 154: mod_base = OTHER; note = uracil
  modified_base 159..160: mod_base = OTHER; note = uracil
  modified_base 172: mod_base = OTHER; note = uracil
  modified_base 177..180: mod_base = OTHER; note = uracil
  modified_base 183: mod_base = OTHER; note = uracil
  modified_base 187..188: mod_base = OTHER; note = uracil
  modified_base 191: mod_base = OTHER; note = uracil
  modified_base 193..194: mod_base = OTHER; note = uracil
  modified_base 196: mod_base = OTHER; note = uracil
  modified_base 199: mod_base = OTHER; note = uracil
  modified_base 201: mod_base = OTHER; note = uracil
  modified_base 204: mod_base = OTHER; note = uracil
  modified_base 210: mod_base = OTHER; note = uracil
  modified_base 212..214: mod_base = OTHER; note = uracil
  modified_base 216: mod_base = OTHER; note = uracil
  modified_base 218..219: mod_base = OTHER; note = uracil
  modified_base 223..224: mod_base = OTHER; note = uracil
  modified_base 227: mod_base = OTHER; note = uracil
  modified_base 232..233: mod_base = OTHER; note = uracil
  modified_base 235..237: mod_base = OTHER; note = uracil
  modified_base 239..240: mod_base = OTHER; note = uracil
  modified_base 243..245: mod_base = OTHER; note = uracil
  modified_base 248: mod_base = OTHER; note = uracil
  modified_base 252: mod_base = OTHER; note = uracil
  modified_base 255: mod_base = OTHER; note = uracil
  modified_base 257: mod_base = OTHER; note = uracil
  modified_base 259: mod_base = OTHER; note = uracil
  modified_base 261..263: mod_base = OTHER; note = uracil
  modified_base 265: mod_base = OTHER; note = uracil
  modified_base 269: mod_base = OTHER; note = uracil
  modified_base 273: mod_base = OTHER; note = uracil
  modified_base 276..278: mod_base = OTHER; note = uracil
  modified_base 281: mod_base = OTHER; note = uracil
  modified_base 284..285: mod_base = OTHER; note = uracil
  modified_base 287..288: mod_base = OTHER; note = uracil
  modified_base 293: mod_base = OTHER; note = uracil
  modified_base 295: mod_base = OTHER; note = uracil
  modified_base 297..298: mod_base = OTHER; note = uracil
  modified_base 111: mod_base = m5c
  modified_base 125: mod_base = m5c
  modified_base 161: mod_base = m5c
  modified_base 170: mod_base = m5c
  modified_base 230: mod_base = m5c
  modified_base 246: mod_base = m5c
  modified_base 279: mod_base = m5c
  variation 149: note = CpG site, residue is C if methylated or T(=U) if unmethylated
ttttgggtttaggtttattatttgtttaatatttagttgatagtgttgttgtgaggttgatagtttgtttttttaatagtagttagaaggatttagttaaattataaattcgattatgttatttcggtatttaaaatttgttagtggtygttatagtgttcggataaggcgtaaggttttagttggttagtattatagtttagttgtgttttttttattttttttgtaacgttttttatttttttcgtatgtagtttttttttatttgttaattgtttcgtaatttttagattttatttg

SEQ ID NO: 427 - DNA, 300 bp, synthetic construct
  source 1..300: mol_type = other DNA
  modified_base 8..11: mod_base = OTHER; note = uracil
  modified_base 18: mod_base = OTHER; note = uracil
  modified_base 26: mod_base = OTHER; note = uracil
  modified_base 29..30: mod_base = OTHER; note = uracil
  modified_base 40: mod_base = OTHER; note = uracil
  modified_base 45: mod_base = OTHER; note = uracil
  modified_base 52: mod_base = OTHER; note = uracil
  modified_base 62..64: mod_base = OTHER; note = uracil
  modified_base 66: mod_base = OTHER; note = uracil
  modified_base 71: mod_base = OTHER; note = uracil
  modified_base 75..77: mod_base = OTHER; note = uracil
  modified_base 80: mod_base = OTHER; note = uracil
  modified_base 83: mod_base = OTHER; note = uracil
  modified_base 90..91: mod_base = OTHER; note = uracil
  modified_base 100: mod_base = OTHER; note = uracil
  modified_base 106: mod_base = OTHER; note = uracil
  modified_base 113: mod_base = OTHER; note = uracil
  modified_base 138..139: mod_base = OTHER; note = uracil
  modified_base 157..158: mod_base = OTHER; note = uracil
  modified_base 164: mod_base = OTHER; note = uracil
  modified_base 166: mod_base = OTHER; note = uracil
  modified_base 169..170: mod_base = OTHER; note = uracil
  modified_base 172: mod_base = OTHER; note = uracil
  modified_base 180..181: mod_base = OTHER; note = uracil
  modified_base 188: mod_base = OTHER; note = uracil
  modified_base 194..196: mod_base = OTHER; note = uracil
  modified_base 215: mod_base = OTHER; note = uracil
  modified_base 227: mod_base = OTHER; note = uracil
  modified_base 229: mod_base = OTHER; note = uracil
  modified_base 238: mod_base = OTHER; note = uracil
  modified_base 245: mod_base = OTHER; note = uracil
  modified_base 248: mod_base = OTHER; note = uracil
  modified_base 258: mod_base = OTHER; note = uracil
  modified_base 260: mod_base = OTHER; note = uracil
  modified_base 271: mod_base = OTHER; note = uracil
  modified_base 283: mod_base = OTHER; note = uracil
  modified_base 297: mod_base = OTHER; note = uracil
  modified_base 300: mod_base = OTHER; note = uracil
  modified_base 24: mod_base = m5c
  modified_base 81: mod_base = m5c
  modified_base 92: mod_base = m5c
  modified_base 274: mod_base = m5c
  modified_base 292: mod_base = m5c
  variation 151: note = CpG site, residue is C if methylated or T(=U) if unmethylated
tgtgttattttagaaagtaaggacgtttttaaagatgtttagagtagtgtttaaagggatgtttattggttagttttaatcgttgtgaattcggaaaatttgagattggtgttagttaatttagaaagtttattttgttaaggttgaggaygtatgtttgtgatatagttttaggaagttttgatgatatgtgtttaaggtggttggggtgtagtttgattttatatatttagggagtatgagatattaattaagtatatttgagaaatatatcggtttggtttagaaaggcgggataat

SEQ ID NO: 428 - DNA, 300 bp, synthetic construct
  source 1..300: mol_type = other DNA
  modified_base 6..7: mod_base = OTHER; note = uracil
  modified_base 10..11: mod_base = OTHER; note = uracil
  modified_base 15: mod_base = OTHER; note = uracil
  modified_base 20..21: mod_base = OTHER; note = uracil
  modified_base 25: mod_base = OTHER; note = uracil
  modified_base 36: mod_base = OTHER; note = uracil
  modified_base 38: mod_base = OTHER; note = uracil
  modified_base 46: mod_base = OTHER; note = uracil
  modified_base 58: mod_base = OTHER; note = uracil
  modified_base 60: mod_base = OTHER; note = uracil
  modified_base 64: mod_base = OTHER; note = uracil
  modified_base 66..68: mod_base = OTHER; note = uracil
  modified_base 83: mod_base = OTHER; note = uracil
  modified_base 87: mod_base = OTHER; note = uracil
  modified_base 90: mod_base = OTHER; note = uracil
  modified_base 92..95: mod_base = OTHER; note = uracil
  modified_base 98..99: mod_base = OTHER; note = uracil
  modified_base 101..102: mod_base = OTHER; note = uracil
  modified_base 108: mod_base = OTHER; note = uracil
  modified_base 110: mod_base = OTHER; note = uracil
  modified_base 115: mod_base = OTHER; note = uracil
  modified_base 118: mod_base = OTHER; note = uracil
  modified_base 123: mod_base = OTHER; note = uracil
  modified_base 126..127: mod_base = OTHER; note = uracil
  modified_base 133: mod_base = OTHER; note = uracil
  modified_base 139: mod_base = OTHER; note = uracil
  modified_base 141: mod_base = OTHER; note = uracil
  modified_base 145: mod_base = OTHER; note = uracil
  modified_base 152..153: mod_base = OTHER; note = uracil
  modified_base 155: mod_base = OTHER; note = uracil
  modified_base 158..159: mod_base = OTHER; note = uracil
  modified_base 164: mod_base = OTHER; note = uracil
  modified_base 173: mod_base = OTHER; note = uracil
  modified_base 177: mod_base = OTHER; note = uracil
  modified_base 186: mod_base = OTHER; note = uracil
  modified_base 190: mod_base = OTHER; note = uracil
  modified_base 192..193: mod_base = OTHER; note = uracil
  modified_base 197: mod_base = OTHER; note = uracil
  modified_base 199: mod_base = OTHER; note = uracil
  modified_base 207: mod_base = OTHER; note = uracil
  modified_base 214: mod_base = OTHER; note = uracil
  modified_base 216: mod_base = OTHER; note = uracil
  modified_base 228: mod_base = OTHER; note = uracil
  modified_base 232..233: mod_base = OTHER; note = uracil
  modified_base 240: mod_base = OTHER; note = uracil
  modified_base 243..245: mod_base = OTHER; note = uracil
  modified_base 252: mod_base = OTHER; note = uracil
  modified_base 254: mod_base = OTHER; note = uracil
  modified_base 257: mod_base = OTHER; note = uracil
  modified_base 259: mod_base = OTHER; note = uracil
  modified_base 264: mod_base = OTHER; note = uracil
  modified_base 267: mod_base = OTHER; note = uracil
  modified_base 279..280: mod_base = OTHER; note = uracil
  modified_base 284: mod_base = OTHER; note = uracil
  modified_base 288: mod_base = OTHER; note = uracil
  modified_base 297: mod_base = OTHER; note = uracil
  modified_base 299: mod_base = OTHER; note = uracil
  modified_base 8: mod_base = m5c
  modified_base 26: mod_base = m5c
  modified_base 208: mod_base = m5c
  modified_base 219: mod_base = m5c
  modified_base 276: mod_base = m5c
  variation 149: note = CpG site, residue is C if methylated or T(=U) if unmethylated
gttgtttcgtttttttagattaaatcgatgtattttttaagtgtatttaattgatgttttatgttttttaagtgtataaaattaagttatattttaattattttgggtatatgttattaggattttttgaggttgtgttataggtataygtttttaattttggtaaaataaattttttaaattaattgatattagttttagatttttcgggtttatagcggttgggattgattagtgggtatttttttgaatattgttttgaatatttttggaagcgtttttgttttttggggtaatata

SEQ ID NO: 429 - DNA, 300 bp, synthetic construct
  source 1..300: mol_type = other DNA
  modified_base 13: mod_base = OTHER; note = uracil
  modified_base 28: mod_base = OTHER; note = uracil
  modified_base 30..31: mod_base = OTHER; note = uracil
  modified_base 34: mod_base = OTHER; note = uracil
  modified_base 43: mod_base = OTHER; note = uracil
  modified_base 45: mod_base = OTHER; note = uracil
  modified_base 48: mod_base = OTHER; note = uracil
  modified_base 52..53: mod_base = OTHER; note = uracil
  modified_base 61: mod_base = OTHER; note = uracil
  modified_base 71: mod_base = OTHER; note = uracil
  modified_base 75: mod_base = OTHER; note = uracil
  modified_base 77: mod_base = OTHER; note = uracil
  modified_base 79: mod_base = OTHER; note = uracil
  modified_base 81: mod_base = OTHER; note = uracil
  modified_base 86: mod_base = OTHER; note = uracil
  modified_base 96: mod_base = OTHER; note = uracil
  modified_base 102: mod_base = OTHER; note = uracil
  modified_base 105: mod_base = OTHER; note = uracil
  modified_base 130: mod_base = OTHER; note = uracil
  modified_base 132: mod_base = OTHER; note = uracil
  modified_base 137: mod_base = OTHER; note = uracil
  modified_base 143: mod_base = OTHER; note = uracil
  modified_base 165: mod_base = OTHER; note = uracil
  modified_base 168..169: mod_base = OTHER; note = uracil
  modified_base 172..174: mod_base = OTHER; note = uracil
  modified_base 188: mod_base = OTHER; note = uracil
  modified_base 194: mod_base = OTHER; note = uracil
  modified_base 209: mod_base = OTHER; note = uracil
  modified_base 211: mod_base = OTHER; note = uracil
  modified_base 213..214: mod_base = OTHER; note = uracil
  modified_base 221..223: mod_base = OTHER; note = uracil
  modified_base 226: mod_base = OTHER; note = uracil
  modified_base 228: mod_base = OTHER; note = uracil
  modified_base 238: mod_base = OTHER; note = uracil
  modified_base 253: mod_base = OTHER; note = uracil
  modified_base 261: mod_base = OTHER; note = uracil
  modified_base 274..275: mod_base = OTHER; note = uracil
  modified_base 278..279: mod_base = OTHER; note = uracil
  modified_base 283..284: mod_base = OTHER; note = uracil
  modified_base 287: mod_base = OTHER; note = uracil
  modified_base 297..298: mod_base = OTHER; note = uracil
  modified_base 21: mod_base = m5c
  modified_base 39: mod_base = m5c
  modified_base 56: mod_base = m5c
  modified_base 82: mod_base = m5c
  modified_base 189: mod_base = m5c
  modified_base 195: mod_base = m5c
  modified_base 199: mod_base = m5c
  modified_base 201: mod_base = m5c
  modified_base 239: mod_base = m5c
  modified_base 244: mod_base = m5c
  modified_base 255: mod_base = m5c
  modified_base 269: mod_base = m5c
  modified_base 299: mod_base = m5c
  variation 151: note = CpG site, residue is C if methylated or T(=U) if unmethylated
tgagaataatgtttggtatgcgaggagtattagtaaatcgtgtttattattttagcggagtaaattgttgttgttttttatcgggttttgggttattgaggttgttatttattaaagtgtgggttgtgatttattattaggttatgaaatyggtgtagtggtagtaattagtttttaaagaaatgaatcggggtcgggcgcggtggtttatatttgtaattttagtattttgggaggtcgaggcgggtggattacgaggttaagagatcgagattattttggttaatatggtgaaattcg

SEQ ID NO: 430 - DNA, 300 bp, synthetic construct
  source 1..300: mol_type = other DNA
  modified_base 8: mod_base = OTHER; note = uracil
  modified_base 10..11: mod_base = OTHER; note = uracil
  modified_base 19..20: mod_base = OTHER; note = uracil
  modified_base 29: mod_base = OTHER; note = uracil
  modified_base 35: mod_base = OTHER; note = uracil
  modified_base 37: mod_base = OTHER; note = uracil
  modified_base 42..43: mod_base = OTHER; note = uracil
  modified_base 51..52: mod_base = OTHER; note = uracil
  modified_base 54..55: mod_base = OTHER; note = uracil
  modified_base 58..59: mod_base = OTHER; note = uracil
  modified_base 64..65: mod_base = OTHER; note = uracil
  modified_base 67..69: mod_base = OTHER; note = uracil
  modified_base 76: mod_base = OTHER; note = uracil
  modified_base 85: mod_base = OTHER; note = uracil
  modified_base 95..96: mod_base = OTHER; note = uracil
  modified_base 98: mod_base = OTHER; note = uracil
  modified_base 103..104: mod_base = OTHER; note = uracil
  modified_base 108..110: mod_base = OTHER; note = uracil
  modified_base 116: mod_base = OTHER; note = uracil
  modified_base 121: mod_base = OTHER; note = uracil
  modified_base 130: mod_base = OTHER; note = uracil
  modified_base 137: mod_base = OTHER; note = uracil
  modified_base 140..141: mod_base = OTHER; note = uracil
  modified_base 143: mod_base = OTHER; note = uracil
  modified_base 146: mod_base = OTHER; note = uracil
  modified_base 148: mod_base = OTHER; note = uracil
  modified_base 155: mod_base = OTHER; note = uracil
  modified_base 160..161: mod_base = OTHER; note = uracil
  modified_base 173: mod_base = OTHER; note = uracil
  modified_base 175: mod_base = OTHER; note = uracil
  modified_base 178..180: mod_base = OTHER; note = uracil
  modified_base 182: mod_base = OTHER; note = uracil
  modified_base 184: mod_base = OTHER; note = uracil
  modified_base 197: mod_base = OTHER; note = uracil
  modified_base 200..201: mod_base = OTHER; note = uracil
  modified_base 203: mod_base = OTHER; note = uracil
  modified_base 209..211: mod_base = OTHER; note = uracil
  modified_base 216..217: mod_base = OTHER; note = uracil
  modified_base 228: mod_base = OTHER; note = uracil
  modified_base 231: mod_base = OTHER; note = uracil
  modified_base 234: mod_base = OTHER; note = uracil
  modified_base 241: mod_base = OTHER; note = uracil
  modified_base 243: mod_base = OTHER; note = uracil
  modified_base 246: mod_base = OTHER; note = uracil
  modified_base 259: mod_base = OTHER; note = uracil
  modified_base 268: mod_base = OTHER; note = uracil
  modified_base 274: mod_base = OTHER; note = uracil
  modified_base 276..277: mod_base = OTHER; note = uracil
  modified_base 281: mod_base = OTHER; note = uracil
  modified_base 285..286: mod_base = OTHER; note = uracil
  modified_base 290: mod_base = OTHER; note = uracil
  modified_base 297: mod_base = OTHER; note = uracil
  modified_base 299: mod_base = OTHER; note = uracil
  modified_base 1: mod_base = m5c
  modified_base 31: mod_base = m5c
  modified_base 45: mod_base = m5c
  modified_base 56: mod_base = m5c
  modified_base 61: mod_base = m5c
  modified_base 99: mod_base = m5c
  modified_base 101: mod_base = m5c
  modified_base 105: mod_base = m5c
  modified_base 111: mod_base = m5c
  modified_base 218: mod_base = m5c
  modified_base 244: mod_base = m5c
  modified_base 261: mod_base = m5c
  modified_base 279: mod_base = m5c
  variation 149: note = CpG site, residue is C if methylated or T(=U) if unmethylated
cgggttttattatgttggttaggatggtttcgattttttgatttcgtgatttattcgtttcggttttttaaagtgttgggattataggtgtgaattatcgcgttcggtttcggtttatttttttaagggttggttgttattattatatygattttatgatttagtaatgagttataatttatattttaataaatagtagttttagtaatttaaagttcggtgagagatagtaataatttgtttcgttggaatgatgagtacgatttgttggtgtttttcgtatattagatattattttta

SEQ ID NO: 431 - DNA, 300 bp, synthetic construct
  source 1..300: mol_type = other DNA
  modified_base 11: mod_base = OTHER; note = uracil
  modified_base 20: mod_base = OTHER; note = uracil
  modified_base 25: mod_base = OTHER; note = uracil
  modified_base 28: mod_base = OTHER; note = uracil
  modified_base 45: mod_base = OTHER; note = uracil
  modified_base 50: mod_base = OTHER; note = uracil
  modified_base 53: mod_base = OTHER; note = uracil
  modified_base 60: mod_base = OTHER; note = uracil
  modified_base 66: mod_base = OTHER; note = uracil
  modified_base 79: mod_base = OTHER; note = uracil
  modified_base 81: mod_base = OTHER; note = uracil
  modified_base 93: mod_base = OTHER; note = uracil
  modified_base 102..103: mod_base = OTHER; note = uracil
  modified_base 107..108: mod_base = OTHER; note = uracil
  modified_base 110..111: mod_base = OTHER; note = uracil
  modified_base 115: mod_base = OTHER; note = uracil
  modified_base 121: mod_base = OTHER; note = uracil
  modified_base 126: mod_base = OTHER; note = uracil
  modified_base 133: mod_base = OTHER; note = uracil
  modified_base 140..141: mod_base = OTHER; note = uracil
  modified_base 144..145: mod_base = OTHER; note = uracil
  modified_base 147: mod_base = OTHER; note = uracil
  modified_base 150: mod_base = OTHER; note = uracil
  modified_base 153..154: mod_base = OTHER; note = uracil
  modified_base 159..160: mod_base = OTHER; note = uracil
  modified_base 172: mod_base = OTHER; note = uracil
  modified_base 175: mod_base = OTHER; note = uracil
  modified_base 183: mod_base = OTHER; note = uracil
  modified_base 193..196: mod_base = OTHER; note = uracil
  modified_base 225..226: mod_base = OTHER; note = uracil
  modified_base 228: mod_base = OTHER; note = uracil
  modified_base 231: mod_base = OTHER; note = uracil
  modified_base 235..236: mod_base = OTHER; note = uracil
  modified_base 247: mod_base = OTHER; note = uracil
  modified_base 255..256: mod_base = OTHER; note = uracil
  modified_base 260: mod_base = OTHER; note = uracil
  modified_base 264..265: mod_base = OTHER; note = uracil
  modified_base 268..269: mod_base = OTHER; note = uracil
  modified_base 273: mod_base = OTHER; note = uracil
  modified_base 280..281: mod_base = OTHER; note = uracil
  modified_base 285: mod_base = OTHER; note = uracil
  modified_base 292: mod_base = OTHER; note = uracil
  modified_base 297: mod_base = OTHER; note = uracil
  modified_base 12: mod_base = m5c
  modified_base 23: mod_base = m5c
  modified_base 26: mod_base = m5c
  modified_base 29: mod_base = m5c
  modified_base 32: mod_base = m5c
  modified_base 38: mod_base = m5c
  modified_base 42: mod_base = m5c
  modified_base 46: mod_base = m5c
  modified_base 48: mod_base = m5c
  modified_base 51: mod_base = m5c
  modified_base 57: mod_base = m5c
  modified_base 76: mod_base = m5c
  modified_base 84: mod_base = m5c
  modified_base 95: mod_base = m5c
  modified_base 112: mod_base = m5c
  modified_base 119: mod_base = m5c
  modified_base 127: mod_base = m5c
  modified_base 129: mod_base = m5c
  modified_base 179: mod_base = m5c
  modified_base 184: mod_base = m5c
  modified_base 197: mod_base = m5c
  modified_base 206: mod_base = m5c
  modified_base 209: mod_base = m5c
  modified_base 213: mod_base = m5c
  modified_base 217: mod_base = m5c
  modified_base 229: mod_base = m5c
  modified_base 233: mod_base = m5c
  modified_base 237: mod_base = m5c
  modified_base 240: mod_base = m5c
  modified_base 242: mod_base = m5c
  modified_base 251: mod_base = m5c
  modified_base 262: mod_base = m5c
  modified_base 266: mod_base = m5c
  modified_base 282: mod_base = m5c
  modified_base 286: mod_base = m5c
  modified_base 298: mod_base = m5c
  variation 151: note = CpG site, residue is C if methylated or T(=U) if unmethylated
aggatggaggtcggggaggtagcgtcgtcggcgggggcgggcggtcgcgtcgtaggcggttggggtaagtgggtgcggtttaacgtggggggtacggtgtttttgattattcggtagacgttgtgtcgcgagtagaagtttttttttagtygtttgtgttagggggaagagttgtagtcggatcgggtgaggttttcggggtgggcggcgagcgggcggtgggtttttcgttcgttcgacgcggggttgtcgggtttggttcgttcgttaggttggggattcggtcgggtttattttcga

SEQ ID NO: 432 - DNA, 300 bp, synthetic construct
  source 1..300: mol_type = other DNA
  modified_base 12..13: mod_base = OTHER; note = uracil
  modified_base 17: mod_base = OTHER; note = uracil
  modified_base 23..26: mod_base = OTHER; note = uracil
  modified_base 29..30: mod_base = OTHER; note = uracil
  modified_base 42..43: mod_base = OTHER; note = uracil
  modified_base 47..48: mod_base = OTHER; note = uracil
  modified_base 52: mod_base = OTHER; note = uracil
  modified_base 55..57: mod_base = OTHER; note = uracil
  modified_base 78..80: mod_base = OTHER; note = uracil
  modified_base 82: mod_base = OTHER; note = uracil
  modified_base 85..86: mod_base = OTHER; note = uracil
  modified_base 89: mod_base = OTHER; note = uracil
  modified_base 93: mod_base = OTHER; note = uracil
  modified_base 96..98: mod_base = OTHER; note = uracil
  modified_base 100..102: mod_base = OTHER; note = uracil
  modified_base 109..110: mod_base = OTHER; note = uracil
  modified_base 112: mod_base = OTHER; note = uracil
  modified_base 114..115: mod_base = OTHER; note = uracil
  modified_base 120: mod_base = OTHER; note = uracil
  modified_base 124: mod_base = OTHER; note = uracil
  modified_base 127: mod_base = OTHER; note = uracil
  modified_base 130: mod_base = OTHER; note = uracil
  modified_base 132: mod_base = OTHER; note = uracil
  modified_base 135..139: mod_base = OTHER; note = uracil
  modified_base 143: mod_base = OTHER; note = uracil
  modified_base 145: mod_base = OTHER; note = uracil
  modified_base 152: mod_base = OTHER; note = uracil
  modified_base 163: mod_base = OTHER; note = uracil
  modified_base 166: mod_base = OTHER; note = uracil
  modified_base 169: mod_base = OTHER; note = uracil
  modified_base 176: mod_base = OTHER; note = uracil
  modified_base 178: mod_base = OTHER; note = uracil
  modified_base 184: mod_base = OTHER; note = uracil
  modified_base 187: mod_base = OTHER; note = uracil
  modified_base 196: mod_base = OTHER; note = uracil
  modified_base 202: mod_base = OTHER; note = uracil
  modified_base 204: mod_base = OTHER; note = uracil
  modified_base 209..214: mod_base = OTHER; note = uracil
  modified_base 223: mod_base = OTHER; note = uracil
  modified_base 226: mod_base = OTHER; note = uracil
  modified_base 228..230: mod_base = OTHER; note = uracil
  modified_base 232: mod_base = OTHER; note = uracil
  modified_base 236..239: mod_base = OTHER; note = uracil
  modified_base 242: mod_base = OTHER; note = uracil
  modified_base 245..246: mod_base = OTHER; note = uracil
  modified_base 257: mod_base = OTHER; note = uracil
  modified_base 260..261: mod_base = OTHER; note = uracil
  modified_base 264..267: mod_base = OTHER; note = uracil
  modified_base 270: mod_base = OTHER; note = uracil
  modified_base 279: mod_base = OTHER; note = uracil
  modified_base 282..283: mod_base = OTHER; note = uracil
  modified_base 285..287: mod_base = OTHER; note = uracil
  modified_base 291..292: mod_base = OTHER; note = uracil
  modified_base 294..295: mod_base = OTHER; note = uracil
  modified_base 298..299: mod_base = OTHER; note = uracil
  modified_base 2: mod_base = m5c
  modified_base 14: mod_base = m5c
  modified_base 18: mod_base = m5c
  modified_base 34: mod_base = m5c
  modified_base 38: mod_base = m5c
  modified_base 49: mod_base = m5c
  modified_base 58: mod_base = m5c
  modified_base 60: mod_base = m5c
  modified_base 63: mod_base = m5c
  modified_base 67: mod_base = m5c
  modified_base 71: mod_base = m5c
  modified_base 83: mod_base = m5c
  modified_base 87: mod_base = m5c
  modified_base 91: mod_base = m5c
  modified_base 94: mod_base = m5c
  modified_base 103: mod_base = m5c
  modified_base 116: mod_base = m5c
  modified_base 121: mod_base = m5c
  modified_base 171: mod_base = m5c
  modified_base 173: mod_base = m5c
  modified_base 181: mod_base = m5c
  modified_base 188: mod_base = m5c
  modified_base 205: mod_base = m5c
  modified_base 216: mod_base = m5c
  modified_base 224: mod_base = m5c
  modified_base 243: mod_base = m5c
  modified_base 249: mod_base = m5c
  modified_base 252: mod_base = m5c
  modified_base 254: mod_base = m5c
  modified_base 258: mod_base = m5c
  modified_base 262: mod_base = m5c
  modified_base 268: mod_base = m5c
  modified_base 271: mod_base = m5c
  modified_base 274: mod_base = m5c
  modified_base 277: mod_base = m5c
  modified_base 288: mod_base = m5c
  variation 149: note = CpG site, residue is C if methylated or T(=U) if unmethylated
tcggaaatgaattcggtcgggtttttagtttggcgggcgagttaggttcgatagtttcgcgtcgggcgagcggaggatttatcgttcgttcgtcgtttatttcgggggttttattcggttcgattgtagtttttttttttggtataggyggttgaggaaggatttttgttcgcggtatagcgtttgtcgggtggttaggaatatcgtgttttttacgttgagtcgtatttatttgttttagtcgtttgcggcgcggtcgttcgttttcgtcggcggcgttgttttttcggtttttatttt

SEQ ID NO: 433 - DNA, 300 bp, synthetic construct
  source 1..300: mol_type = other DNA
  modified_base 2: mod_base = OTHER; note = uracil
  modified_base 5: mod_base = OTHER; note = uracil
  modified_base 17: mod_base = OTHER; note = uracil
  modified_base 22..25: mod_base = OTHER; note = uracil
  modified_base 30: mod_base = OTHER; note = uracil
  modified_base 33: mod_base = OTHER; note = uracil
  modified_base 38..40: mod_base = OTHER; note = uracil
  modified_base 44: mod_base = OTHER; note = uracil
  modified_base 51: mod_base = OTHER; note = uracil
  modified_base 54: mod_base = OTHER; note = uracil
  modified_base 59: mod_base = OTHER; note = uracil
  modified_base 68: mod_base = OTHER; note = uracil
  modified_base 73..76: mod_base = OTHER; note = uracil
  modified_base 81: mod_base = OTHER; note = uracil
  modified_base 86: mod_base = OTHER; note = uracil
  modified_base 90..92: mod_base = OTHER; note = uracil
  modified_base 102..104: mod_base = OTHER; note = uracil
  modified_base 106: mod_base = OTHER; note = uracil
  modified_base 113..114: mod_base = OTHER; note = uracil
  modified_base 120: mod_base = OTHER; note = uracil
  modified_base 122: mod_base = OTHER; note = uracil
  modified_base 124: mod_base = OTHER; note = uracil
  modified_base 142: mod_base = OTHER; note = uracil
  modified_base 160: mod_base = OTHER; note = uracil
  modified_base 162: mod_base = OTHER; note = uracil
  modified_base 165: mod_base = OTHER; note = uracil
  modified_base 167..168: mod_base = OTHER; note = uracil
  modified_base 170..171: mod_base = OTHER; note = uracil
  modified_base 173..174: mod_base = OTHER; note = uracil
  modified_base 179..180: mod_base = OTHER; note = uracil
  modified_base 183: mod_base = OTHER; note = uracil
  modified_base 194..195: mod_base = OTHER; note = uracil
  modified_base 199: mod_base = OTHER; note = uracil
  modified_base 201: mod_base = OTHER; note = uracil
  modified_base 207: mod_base = OTHER; note = uracil
  modified_base 222: mod_base = OTHER; note = uracil
  modified_base 227: mod_base = OTHER; note = uracil
  modified_base 234: mod_base = OTHER; note = uracil
  modified_base 245..246: mod_base = OTHER; note = uracil
  modified_base 249: mod_base = OTHER; note = uracil
  modified_base 255: mod_base = OTHER; note = uracil
  modified_base 262..264: mod_base = OTHER; note = uracil
  modified_base 273: mod_base = OTHER; note = uracil
  modified_base 275..277: mod_base = OTHER; note = uracil
  modified_base 279: mod_base = OTHER; note = uracil
  modified_base 287..288: mod_base = OTHER; note = uracil
  modified_base 290..291: mod_base = OTHER; note = uracil
  modified_base 293: mod_base = OTHER; note = uracil
  modified_base 296..297: mod_base = OTHER; note = uracil
  modified_base 299: mod_base = OTHER; note = uracil
  modified_base 11: mod_base = m5c
  modified_base 18: mod_base = m5c
  modified_base 47: mod_base = m5c
  modified_base 49: mod_base = m5c
  modified_base 56: mod_base = m5c
  modified_base 66: mod_base = m5c
  modified_base 71: mod_base = m5c
  modified_base 83: mod_base = m5c
  modified_base 87: mod_base = m5c
  modified_base 97: mod_base = m5c
  modified_base 108: mod_base = m5c
  modified_base 115: mod_base = m5c
  modified_base 117: mod_base = m5c
  modified_base 125: mod_base = m5c
  modified_base 130: mod_base = m5c
  modified_base 137: mod_base = m5c
  modified_base 139: mod_base = m5c
  modified_base 144: mod_base = m5c
  modified_base 176: mod_base = m5c
  modified_base 185: mod_base = m5c
  modified_base 188: mod_base = m5c
  modified_base 196: mod_base = m5c
  modified_base 205: mod_base = m5c
  modified_base 213: mod_base = m5c
  modified_base 216: mod_base = m5c
  modified_base 228: mod_base = m5c
  modified_base 239: mod_base = m5c
  modified_base 241: mod_base = m5c
  modified_base 250: mod_base = m5c
  modified_base 256: mod_base = m5c
  modified_base 260: mod_base = m5c
  modified_base 266: mod_base = m5c
  modified_base 271: mod_base = m5c
  modified_base 282: mod_base = m5c
  modified_base 284: mod_base = m5c
  modified_base 294: mod_base = m5c
  variation 151: note = CpG site, residue is C if methylated or T(=U) if unmethylated
tttattgatgcggagatcgagttttagggtagtagagttttagtttcgcgttatacggttgtgggcgttgcgttttagggtacggtcggtttaggtcgtggtttattcgggattcgcggtttatcggtgcggttgacgcggtacgggaagyggtaggtgtttagtatttttttttcgttttgttcgtcgatgattcggtattggcgtagatacggcgtgagtttggtcgggtttagggcgcgagttagtcgatgtcggacgttttcgattcgtttttatagcgcgttttttttcgtttta

SEQ ID NO: 434 - DNA, 300 bp, synthetic construct
  source 1..300: mol_type = other DNA
  modified_base 20: mod_base = OTHER; note = uracil
  modified_base 43: mod_base = OTHER; note = uracil
  modified_base 47: mod_base = OTHER; note = uracil
  modified_base 53: mod_base = OTHER; note = uracil
  modified_base 57: mod_base = OTHER; note = uracil
  modified_base 63..65: mod_base = OTHER; note = uracil
  modified_base 70..71: mod_base = OTHER; note = uracil
  modified_base 75..76: mod_base = OTHER; note = uracil
  modified_base 80: mod_base = OTHER; note = uracil
  modified_base 82: mod_base = OTHER; note = uracil
  modified_base 86: mod_base = OTHER; note = uracil
  modified_base 92: mod_base = OTHER; note = uracil
  modified_base 97..98: mod_base = OTHER; note = uracil
  modified_base 103: mod_base = OTHER; note = uracil
  modified_base 109: mod_base = OTHER; note = uracil
  modified_base 119: mod_base = OTHER; note = uracil
  modified_base 137: mod_base = OTHER; note = uracil
  modified_base 142: mod_base = OTHER; note = uracil
  modified_base 144..145: mod_base = OTHER; note = uracil
  modified_base 148: mod_base = OTHER; note = uracil
  modified_base 151: mod_base = OTHER; note = uracil
  modified_base 154..155: mod_base = OTHER; note = uracil
  modified_base 160: mod_base = OTHER; note = uracil
  modified_base 166: mod_base = OTHER; note = uracil
  modified_base 169: mod_base = OTHER; note = uracil
  modified_base 172: mod_base = OTHER; note = uracil
  modified_base 174: mod_base = OTHER; note = uracil
  modified_base 182: mod_base = OTHER; note = uracil
  modified_base 190..191: mod_base = OTHER; note = uracil
  modified_base 200..201: mod_base = OTHER; note = uracil
  modified_base 206..207: mod_base = OTHER; note = uracil
  modified_base 212: mod_base = OTHER; note = uracil
  modified_base 216: mod_base = OTHER; note = uracil
  modified_base 221..223: mod_base = OTHER; note = uracil
  modified_base 231: mod_base = OTHER; note = uracil
  modified_base 236..238: mod_base = OTHER; note = uracil
  modified_base 240: mod_base = OTHER; note = uracil
  modified_base 243: mod_base = OTHER; note = uracil
  modified_base 258: mod_base = OTHER; note = uracil
  modified_base 264: mod_base = OTHER; note = uracil
  modified_base 266: mod_base = OTHER; note = uracil
  modified_base 269: mod_base = OTHER; note = uracil
  modified_base 272..274: mod_base = OTHER; note = uracil
  modified_base 280: mod_base = OTHER; note = uracil
  modified_base 286: mod_base = OTHER; note = uracil
  modified_base 288: mod_base = OTHER; note = uracil
  modified_base 291: mod_base = OTHER; note = uracil
  modified_base 294: mod_base = OTHER; note = uracil
  modified_base 6: mod_base = m5c
  modified_base 16: mod_base = m5c
  modified_base 18: mod_base = m5c
  modified_base 29: mod_base = m5c
  modified_base 34: mod_base = m5c
  modified_base 40: mod_base = m5c
  modified_base 44: mod_base = m5c
  modified_base 50: mod_base = m5c
  modified_base 59: mod_base = m5c
  modified_base 61: mod_base = m5c
  modified_base 72: mod_base = m5c
  modified_base 84: mod_base = m5c
  modified_base 87: mod_base = m5c
  modified_base 95: mod_base = m5c
  modified_base 104: mod_base = m5c
  modified_base 112: mod_base = m5c
  modified_base 115: mod_base = m5c
  modified_base 124: mod_base = m5c
  modified_base 156: mod_base = m5c
  modified_base 161: mod_base = m5c
  modified_base 163: mod_base = m5c
  modified_base 170: mod_base = m5c
  modified_base 175: mod_base = m5c
  modified_base 183: mod_base = m5c
  modified_base 185: mod_base = m5c
  modified_base 192: mod_base = m5c
  modified_base 203: mod_base = m5c
  modified_base 213: mod_base = m5c
  modified_base 217: mod_base = m5c
  modified_base 229: mod_base = m5c
  modified_base 234: mod_base = m5c
  modified_base 244: mod_base = m5c
  modified_base 251: mod_base = m5c
  modified_base 253: mod_base = m5c
  modified_base 282: mod_base = m5c
  modified_base 289: mod_base = m5c
  variation 149: note = CpG site, residue is C if methylated or T(=U) if unmethylated
tgaggcggaggaggacgcgttgtgggagcgaatcgagggcgttcggtatcggttggttcgcgttttgaattcggttaagtttacgtcgtatttgcgttagtgtcgggttatcgacgagtaggacgaggaggaggtgttgagtatttatygtttttcgtgtcgcgttaatcgtatcggtgagtcgcgggtttcgagtgggttacgatttgggtcggtcgtgttttggggcgtagcgtttatagtcgtgtagcgcgaagttagggttttgttgttttggggttcggttttcgtattagtaga

SEQ ID NO: 435 - DNA, 300 bp, synthetic construct
  source 1..300: mol_type = other DNA
  modified_base 1: mod_base = OTHER; note = uracil
  modified_base 3: mod_base = OTHER; note = uracil
  modified_base 5..6: mod_base = OTHER; note = uracil
  modified_base 10..11: mod_base = OTHER; note = uracil
  modified_base 25..27: mod_base = OTHER; note = uracil
  modified_base 29: mod_base = OTHER; note = uracil
  modified_base 31: mod_base = OTHER; note = uracil
  modified_base 34: mod_base = OTHER; note = uracil
  modified_base 37..40: mod_base = OTHER; note = uracil
  modified_base 49: mod_base = OTHER; note = uracil
  modified_base 52..55: mod_base = OTHER; note = uracil
  modified_base 64..66: mod_base = OTHER; note = uracil
  modified_base 74..75: mod_base = OTHER; note = uracil
  modified_base 78..79: mod_base = OTHER; note = uracil
  modified_base 82: mod_base = OTHER; note = uracil
  modified_base 87: mod_base = OTHER; note = uracil
  modified_base 92..93: mod_base = OTHER; note = uracil
  modified_base 96: mod_base = OTHER; note = uracil
  modified_base 99: mod_base = OTHER; note = uracil
  modified_base 101: mod_base = OTHER; note = uracil
  modified_base 113: mod_base = OTHER; note = uracil
  modified_base 118..119: mod_base = OTHER; note = uracil
  modified_base 121: mod_base = OTHER; note = uracil
  modified_base 123: mod_base = OTHER; note = uracil
  modified_base 129: mod_base = OTHER; note = uracil
  modified_base 133: mod_base = OTHER; note = uracil
  modified_base 139: mod_base = OTHER; note = uracil
  modified_base 142: mod_base = OTHER; note = uracil
  modified_base 147: mod_base = OTHER; note = uracil
  modified_base 152..155: mod_base = OTHER; note = uracil
  modified_base 167: mod_base = OTHER; note = uracil
  modified_base 171: mod_base = OTHER; note = uracil
  modified_base 174: mod_base = OTHER; note = uracil
  modified_base 177: mod_base = OTHER; note = uracil
  modified_base 181: mod_base = OTHER; note = uracil
  modified_base 186: mod_base = OTHER; note = uracil
  modified_base 199: mod_base = OTHER; note = uracil
  modified_base 202: mod_base = OTHER; note = uracil
  modified_base 215: mod_base = OTHER; note = uracil
  modified_base 218: mod_base = OTHER; note = uracil
  modified_base 220: mod_base = OTHER; note = uracil
  modified_base 232: mod_base = OTHER; note = uracil
  modified_base 234: mod_base = OTHER; note = uracil
  modified_base 236..237: mod_base = OTHER; note = uracil
  modified_base 240: mod_base = OTHER; note = uracil
  modified_base 246..247: mod_base = OTHER; note = uracil
  modified_base 254: mod_base = OTHER; note = uracil
  modified_base 265..266: mod_base = OTHER; note = uracil
  modified_base 270: mod_base = OTHER; note = uracil
  modified_base 280..282: mod_base = OTHER; note = uracil
  modified_base 287: mod_base = OTHER; note = uracil
  modified_base 294: mod_base = OTHER; note = uracil
  modified_base 297..298: mod_base = OTHER; note = uracil
  modified_base 102: mod_base = m5c
  modified_base 187: mod_base = m5c
  modified_base 221: mod_base = m5c
  variation 149: note = CpG site, residue is C if methylated or T(=U) if unmethylated
tttattttttttagtttagaaaattttttattgtttttttaatggaggttgttttaggagtggtttagtggggttaattagttgttttatgttagtagtttcggagtatgtatatttttattttggtttaaatttgtttttttatttayggttttattaagaaaaatatttatttgtaggttggatcgggttgggatgtagtaagttggtgtggttatttcgagtgtgtgatatatttgtaggggtttgtgagtagtgggagggttagatatgtggatttttagggttggtggttttttt

SEQ ID NO: 436 - DNA, 300 bp, synthetic construct
  source 1..300: mol_type = other DNA
  modified_base 7..8: mod_base = OTHER; note = uracil
  modified_base 10..11: mod_base = OTHER; note = uracil
  modified_base 14..16: mod_base = OTHER; note = uracil
  modified_base 24..25: mod_base = OTHER; note = uracil
  modified_base 27: mod_base = OTHER; note = uracil
  modified_base 32: mod_base = OTHER; note = uracil
  modified_base 36..38: mod_base = OTHER; note = uracil
  modified_base 40..42: mod_base = OTHER; note = uracil
  modified_base 44: mod_base = OTHER; note = uracil
  modified_base 47: mod_base = OTHER; note = uracil
  modified_base 49: mod_base = OTHER; note = uracil
  modified_base 51: mod_base = OTHER; note = uracil
  modified_base 55..58: mod_base = OTHER; note = uracil
  modified_base 61: mod_base = OTHER; note = uracil
  modified_base 70: mod_base = OTHER; note = uracil
  modified_base 72: mod_base = OTHER; note = uracil
  modified_base 74: mod_base = OTHER; note = uracil
  modified_base 76: mod_base = OTHER; note = uracil
  modified_base 86..87: mod_base = OTHER; note = uracil
  modified_base 89: mod_base = OTHER; note = uracil
  modified_base 91..92: mod_base = OTHER; note = uracil
  modified_base 95: mod_base = OTHER; note = uracil
  modified_base 99: mod_base = OTHER; note = uracil
  modified_base 102: mod_base = OTHER; note = uracil
  modified_base 105..107: mod_base = OTHER; note = uracil
  modified_base 110..111: mod_base = OTHER; note = uracil
  modified_base 116..117: mod_base = OTHER; note = uracil
  modified_base 120..121: mod_base = OTHER; note = uracil
  modified_base 124: mod_base = OTHER; note = uracil
  modified_base 139: mod_base = OTHER; note = uracil
  modified_base 149: mod_base = OTHER; note = uracil
  modified_base 164: mod_base = OTHER; note = uracil
  modified_base 174..175: mod_base = OTHER; note = uracil
  modified_base 190: mod_base = OTHER; note = uracil
  modified_base 194: mod_base = OTHER; note = uracil
  modified_base 196: mod_base = OTHER; note = uracil
  modified_base 202: mod_base = OTHER; note = uracil
  modified_base 205: mod_base = OTHER; note = uracil
  modified_base 209: mod_base = OTHER; note = uracil
  modified_base 216: mod_base = OTHER; note = uracil
  modified_base 219: mod_base = OTHER; note = uracil
  modified_base 227..230: mod_base = OTHER; note = uracil
  modified_base 232: mod_base = OTHER; note = uracil
  modified_base 237..238: mod_base = OTHER; note = uracil
  modified_base 240: mod_base = OTHER; note = uracil
  modified_base 242..243: mod_base = OTHER; note = uracil
  modified_base 249: mod_base = OTHER; note = uracil
  modified_base 252..253: mod_base = OTHER; note = uracil
  modified_base 255..256: mod_base = OTHER; note = uracil
  modified_base 267: mod_base = OTHER; note = uracil
  modified_base 281: mod_base = OTHER; note = uracil
  modified_base 286: mod_base = OTHER; note = uracil
  modified_base 78: mod_base = m5c
  modified_base 112: mod_base = m5c
  modified_base 197: mod_base = m5c
  variation 150: note = CpG site, residue is C if methylated or T(=U) if unmethylated
aggaagttattagttttgggaatttatatgtttggtttttttattgtttataggtttttgtaggtgtgttatatattcggagtagttatattaatttgttgtattttaattcggtttagtttgtagatgaatgttttttttaatggggtygtgaatagaagaataagtttgaattagagtggaaatgtatatatttcggagttgttggtatagaatagttggttggttttattgggttatttttggggtagtttttattggggaagtagtgagggattttttaaattaggaaaggtgaga

SEQ ID NO: 437 - DNA, 300 bp, synthetic construct
  source 1..300: mol_type = other DNA
  modified_base 5: mod_base = OTHER; note = uracil
  modified_base 9: mod_base = OTHER; note = uracil
  modified_base 12: mod_base = OTHER; note = uracil
  modified_base 16: mod_base = OTHER; note = uracil
  modified_base 24: mod_base = OTHER; note = uracil
  modified_base 31: mod_base = OTHER; note = uracil
  modified_base 36: mod_base = OTHER; note = uracil
  modified_base 40..41: mod_base = OTHER; note = uracil
  modified_base 44..45: mod_base = OTHER; note = uracil
  modified_base 52: mod_base = OTHER; note = uracil
  modified_base 56: mod_base = OTHER; note = uracil
  modified_base 64: mod_base = OTHER; note = uracil
  modified_base 71: mod_base = OTHER; note = uracil
  modified_base 74..75: mod_base = OTHER; note = uracil
  modified_base 81..83: mod_base = OTHER; note = uracil
  modified_base 86..87: mod_base = OTHER; note = uracil
  modified_base 92: mod_base = OTHER; note = uracil
  modified_base 96: mod_base = OTHER; note = uracil
  modified_base 99: mod_base = OTHER; note = uracil
  modified_base 103: mod_base = OTHER; note = uracil
  modified_base 105: mod_base = OTHER; note = uracil
  modified_base 109: mod_base = OTHER; note = uracil
  modified_base 120..121: mod_base = OTHER; note = uracil
  modified_base 127..128: mod_base = OTHER; note = uracil
  modified_base 135: mod_base = OTHER; note = uracil
  modified_base 141: mod_base = OTHER; note = uracil
  modified_base 147: mod_base = OTHER; note = uracil
  modified_base 149: mod_base = OTHER; note = uracil
  modified_base 154: mod_base = OTHER; note = uracil
  modified_base 161..163: mod_base = OTHER; note = uracil
  modified_base 166: mod_base = OTHER; note = uracil
  modified_base 168: mod_base = OTHER; note = uracil
  modified_base 170: mod_base = OTHER; note = uracil
  modified_base 178: mod_base = OTHER; note = uracil
  modified_base 191: mod_base = OTHER; note = uracil
  modified_base 193: mod_base = OTHER; note = uracil
  modified_base 200..201: mod_base = OTHER; note = uracil
  modified_base 215..216: mod_base = OTHER; note = uracil
  modified_base 219: mod_base = OTHER; note = uracil
  modified_base 225: mod_base = OTHER; note = uracil
  modified_base 228: mod_base = OTHER; note = uracil
  modified_base 238..240: mod_base = OTHER; note = uracil
  modified_base 244: mod_base = OTHER; note = uracil
  modified_base 246: mod_base = OTHER; note = uracil
  modified_base 249: mod_base = OTHER; note = uracil
  modified_base 258: mod_base = OTHER; note = uracil
  modified_base 269: mod_base = OTHER; note = uracil
  modified_base 282: mod_base = OTHER; note = uracil
  modified_base 284: mod_base = OTHER; note = uracil
  modified_base 288..289: mod_base = OTHER; note = uracil
  modified_base 297..298: mod_base = OTHER; note = uracil
  modified_base 3: mod_base = m5c
  modified_base 17: mod_base = m5c
  modified_base 59: mod_base = m5c
  modified_base 77: mod_base = m5c
  modified_base 101: mod_base = m5c
  modified_base 129: mod_base = m5c
  modified_base 186: mod_base = m5c
  modified_base 270: mod_base = m5c
  variation 151: note = CpG site, residue is C if methylated or T(=U) if unmethylated
aacgttgatattttttcgggtgtttgaaaatagaattggtttttttaagaattaataacgatattgtttttagttacgttttttttttgtttttgttatacgttttgttaaataggtggttagaggttcgggtgtagatgtagtggtttaygttagtaattttagtattttgggaggttggtgggcggattatttgaggttaggagtttaaagattagtttgggtaatatggtgaaattttgtttttattaaaaatataaaaaattagtcgggtgtggtggtataaatttgtagttttag

SEQ ID NO: 438 - DNA, 300 bp, synthetic construct
  source 1..300: mol_type = other DNA
  modified_base 1: mod_base = OTHER; note = uracil
  modified_base 7: mod_base = OTHER; note = uracil
  modified_base 10: mod_base = OTHER; note = uracil
  modified_base 20..21: mod_base = OTHER; note = uracil
  modified_base 23..24: mod_base = OTHER; note = uracil
  modified_base 26: mod_base = OTHER; note = uracil
  modified_base 28..29: mod_base = OTHER; note = uracil
  modified_base 33: mod_base = OTHER; note = uracil
  modified_base 59: mod_base = OTHER; note = uracil
  modified_base 67: mod_base = OTHER; note = uracil
  modified_base 69..70: mod_base = OTHER; note = uracil
  modified_base 77..79: mod_base = OTHER; note = uracil
  modified_base 83: mod_base = OTHER; note = uracil
  modified_base 88: mod_base = OTHER; note = uracil
  modified_base 95: mod_base = OTHER; note = uracil
  modified_base 97..98: mod_base = OTHER; note = uracil
  modified_base 102..103: mod_base = OTHER; note = uracil
  modified_base 105: mod_base = OTHER; note = uracil
  modified_base 113: mod_base = OTHER; note = uracil
  modified_base 116..118: mod_base = OTHER; note = uracil
  modified_base 120..121: mod_base = OTHER; note = uracil
  modified_base 124..125: mod_base = OTHER; note = uracil
  modified_base 127..129: mod_base = OTHER; note = uracil
  modified_base 136: mod_base = OTHER; note = uracil
  modified_base 145: mod_base = OTHER; note = uracil
  modified_base 155..156: mod_base = OTHER; note = uracil
  modified_base 158: mod_base = OTHER; note = uracil
  modified_base 161: mod_base = OTHER; note = uracil
  modified_base 164: mod_base = OTHER; note = uracil
  modified_base 167: mod_base = OTHER; note = uracil
  modified_base 169..170: mod_base = OTHER; note = uracil
  modified_base 175..176: mod_base = OTHER; note = uracil
  modified_base 178: mod_base = OTHER; note = uracil
  modified_base 182..183: mod_base = OTHER; note = uracil
  modified_base 185..186: mod_base = OTHER; note = uracil
  modified_base 194: mod_base = OTHER; note = uracil
  modified_base 206: mod_base = OTHER; note = uracil
  modified_base 212: mod_base = OTHER; note = uracil
  modified_base 228: mod_base = OTHER; note = uracil
  modified_base 235: mod_base = OTHER; note = uracil
  modified_base 252: mod_base = OTHER; note = uracil
  modified_base 262..263: mod_base = OTHER; note = uracil
  modified_base 268: mod_base = OTHER; note = uracil
  modified_base 275: mod_base = OTHER; note = uracil
  modified_base 279: mod_base = OTHER; note = uracil
  modified_base 281..282: mod_base = OTHER; note = uracil
  modified_base 294: mod_base = OTHER; note = uracil
  modified_base 30: mod_base = m5c
  modified_base 114: mod_base = m5c
  modified_base 171: mod_base = m5c
  modified_base 199: mod_base = m5c
  modified_base 223: mod_base = m5c
  modified_base 241: mod_base = m5c
  modified_base 283: mod_base = m5c
  modified_base 297: mod_base = m5c
  variation 149: note = CpG site, residue is C if methylated or T(=U) if unmethylated
ttggaattataggtttgtgttattatattcggttaattttttgtatttttagtagagatagggttttattatgttgtttaagttggtttttaaatttttggttttaagtgattcgtttattagttttttagagtgttgggattattgaygtgagttattgtatttgtattcgggtttttggttatttatttgatagagcgtgtagtaagaataggaagggaacgtggttgaaaatagtatcgttgttagtttttaggaaggttagttttgtttttagatattcggaaagatgttagcgtt

SEQ ID NO: 439 - DNA, 300 bp, synthetic construct
  source 1..300: mol_type = other DNA
  modified_base 5..7: mod_base = OTHER; note = uracil
  modified_base 9..11: mod_base = OTHER; note = uracil
  modified_base 15..19: mod_base = OTHER; note = uracil
  modified_base 22: mod_base = OTHER; note = uracil
  modified_base 24: mod_base = OTHER; note = uracil
  modified_base 32: mod_base = OTHER; note = uracil
  modified_base 35: mod_base = OTHER; note = uracil
  modified_base 43..44: mod_base = OTHER; note = uracil
  modified_base 48..50: mod_base = OTHER; note = uracil
  modified_base 54: mod_base = OTHER; note = uracil
  modified_base 62: mod_base = OTHER; note = uracil
  modified_base 64: mod_base = OTHER; note = uracil
  modified_base 68..69: mod_base = OTHER; note = uracil
  modified_base 75: mod_base = OTHER; note = uracil
  modified_base 78: mod_base = OTHER; note = uracil
  modified_base 81: mod_base = OTHER; note = uracil
  modified_base 84: mod_base = OTHER; note = uracil
  modified_base 86..88: mod_base = OTHER; note = uracil
  modified_base 90: mod_base = OTHER; note = uracil
  modified_base 92: mod_base = OTHER; note = uracil
  modified_base 94..95: mod_base = OTHER; note = uracil
  modified_base 97..98: mod_base = OTHER; note = uracil
  modified_base 100: mod_base = OTHER; note = uracil
  modified_base 102..104: mod_base = OTHER; note = uracil
  modified_base 107..108: mod_base = OTHER; note = uracil
  modified_base 113..115: mod_base = OTHER; note = uracil
  modified_base 120..121: mod_base = OTHER; note = uracil
  modified_base 127..128: mod_base = OTHER; note = uracil
  modified_base 132: mod_base = OTHER; note = uracil
  modified_base 134: mod_base = OTHER; note = uracil
  modified_base 136: mod_base = OTHER; note = uracil
  modified_base 139: mod_base = OTHER; note = uracil
  modified_base 144..146: mod_base = OTHER; note = uracil
  modified_base 149: mod_base = OTHER; note = uracil
  modified_base 152..153: mod_base = OTHER; note = uracil
  modified_base 158..159: mod_base = OTHER; note = uracil
  modified_base 161..163: mod_base = OTHER; note = uracil
  modified_base 165..167: mod_base = OTHER; note = uracil
  modified_base 173..175: mod_base = OTHER; note = uracil
  modified_base 178: mod_base = OTHER; note = uracil
  modified_base 180..181: mod_base = OTHER; note = uracil
  modified_base 185..187: mod_base = OTHER; note = uracil
  modified_base 192: mod_base = OTHER; note = uracil
  modified_base 198: mod_base = OTHER; note = uracil
  modified_base 200: mod_base = OTHER; note = uracil
  modified_base 207: mod_base = OTHER; note = uracil
  modified_base 211..213: mod_base = OTHER; note = uracil
  modified_base 215: mod_base = OTHER; note = uracil
  modified_base 221: mod_base = OTHER; note = uracil
  modified_base 228: mod_base = OTHER; note = uracil
  modified_base 233: mod_base = OTHER; note = uracil
  modified_base 239: mod_base = OTHER; note = uracil
  modified_base 241: mod_base = OTHER; note = uracil
  modified_base 243..244: mod_base = OTHER; note = uracil
  modified_base 246: mod_base = OTHER; note = uracil
  modified_base 248: mod_base = OTHER; note = uracil
  modified_base 253: mod_base = OTHER; note = uracil
  modified_base 261: mod_base = OTHER; note = uracil
  modified_base 266: mod_base = OTHER; note = uracil
  modified_base 268..269: mod_base = OTHER; note = uracil
  modified_base 272: mod_base = OTHER; note = uracil
  modified_base 277..279: mod_base = OTHER; note = uracil
  modified_base 282: mod_base = OTHER; note = uracil
  modified_base 288: mod_base = OTHER; note = uracil
  modified_base 290: mod_base = OTHER; note = uracil
  modified_base 293..294: mod_base = OTHER; note = uracil
  modified_base 297..299: mod_base = OTHER; note = uracil
  modified_base 13: mod_base = m5c
  modified_base 26: mod_base = m5c
  modified_base 109: mod_base = m5c
  modified_base 182: mod_base = m5c
  modified_base 189: mod_base = m5c
  modified_base 236: mod_base = m5c
  modified_base 285: mod_base = m5c
  variation 150: note = CpG site, residue is C if methylated or T(=U) if unmethylated
gaggtttatttacgtttttagtttacgatatttgtagagatgttaaattttggtagaggaatttaggttatgtgttttagttgtttttttatttttttattttttgttcgggttttgagttaggagttaggtatatagttggatttattygttaatgttatttatttttgtgtttagtattcggtttacggtaggtgtttagtgtgtaggtttatatgtattaggtgtaaggtaacgatatattatataggataaggatgtaaagtattttttgggtttttttgcggttttgttttttta

SEQ ID NO: 440 - DNA, 300 bp, synthetic construct
  source 1..300: mol_type = other DNA
  modified_base 9: mod_base = OTHER; note = uracil
  modified_base 14: mod_base = OTHER; note = uracil
  modified_base 17: mod_base = OTHER; note = uracil
  modified_base 25..27: mod_base = OTHER; note = uracil
  modified_base 36: mod_base = OTHER; note = uracil
  modified_base 41: mod_base = OTHER; note = uracil
  modified_base 44..45: mod_base = OTHER; note = uracil
  modified_base 50..51: mod_base = OTHER; note = uracil
  modified_base 69..70: mod_base = OTHER; note = uracil
  modified_base 74: mod_base = OTHER; note = uracil
  modified_base 76..77: mod_base = OTHER; note = uracil
  modified_base 83: mod_base = OTHER; note = uracil
  modified_base 91..92: mod_base = OTHER; note = uracil
  modified_base 95: mod_base = OTHER; note = uracil
  modified_base 97: mod_base = OTHER; note = uracil
  modified_base 99: mod_base = OTHER; note = uracil
  modified_base 104: mod_base = OTHER; note = uracil
  modified_base 106..107: mod_base = OTHER; note = uracil
  modified_base 110: mod_base = OTHER; note = uracil
  modified_base 117: mod_base = OTHER; note = uracil
  modified_base 124: mod_base = OTHER; note = uracil
  modified_base 129: mod_base = OTHER; note = uracil
  modified_base 131: mod_base = OTHER; note = uracil
  modified_base 144: mod_base = OTHER; note = uracil
  modified_base 159..160: mod_base = OTHER; note = uracil
  modified_base 163: mod_base = OTHER; note = uracil
  modified_base 170..171: mod_base = OTHER; note = uracil
  modified_base 175: mod_base = OTHER; note = uracil
  modified_base 177..178: mod_base = OTHER; note = uracil
  modified_base 182: mod_base = OTHER; note = uracil
  modified_base 184: mod_base = OTHER; note = uracil
  modified_base 189..190: mod_base = OTHER; note = uracil
  modified_base 195: mod_base = OTHER; note = uracil
  modified_base 218: mod_base = OTHER; note = uracil
  modified_base 221: mod_base = OTHER; note = uracil
  modified_base 227: mod_base = OTHER; note = uracil
  modified_base 229: mod_base = OTHER; note = uracil
  modified_base 234..235: mod_base = OTHER; note = uracil
  modified_base 242..243: mod_base = OTHER; note = uracil
  modified_base 245: mod_base = OTHER; note = uracil
  modified_base 248..249: mod_base = OTHER; note = uracil
  modified_base 259: mod_base = OTHER; note = uracil
  modified_base 262: mod_base = OTHER; note = uracil
  modified_base 264: mod_base = OTHER; note = uracil
  modified_base 267: mod_base = OTHER; note = uracil
  modified_base 280: mod_base = OTHER; note = uracil
  modified_base 297..298: mod_base = OTHER; note = uracil
  modified_base 300: mod_base = OTHER; note = uracil
  modified_base 15: mod_base = m5c
  modified_base 64: mod_base = m5c
  modified_base 111: mod_base = m5c
  modified_base 118: mod_base = m5c
  modified_base 191: mod_base = m5c
  modified_base 274: mod_base = m5c
  modified_base 287: mod_base = m5c
  variation 150: note = CpG site, residue is C if methylated or T(=U) if unmethylated
tgggaaggtagagtcgtagaagggtttagaaggtgttttgtatttttgttttgtgtggtgtgtcgttgttttgtatttagtatatgtgggtttgtatattgagtatttgtcgtgggtcgggtgttgggtataagggtgggtggtattggyggatgggtttagttgtgtgtttggtttttggtttagggttcgggtagggagtggaggagtgagggagtagttgaagtatatggtttgagtttttttgttagggtttggtatttttgtagatatcgtgagttgggggcgtgggtgggtttt

SEQ ID NO: 441 - DNA, 300 bp, synthetic construct
  source 1..300: mol_type = other DNA
  modified_base 6: mod_base = OTHER; note = uracil
  modified_base 16..17: mod_base = OTHER; note = uracil
  modified_base 21: mod_base = OTHER; note = uracil
  modified_base 29: mod_base = OTHER; note = uracil
  modified_base 36: mod_base = OTHER; note = uracil
  modified_base 48: mod_base = OTHER; note = uracil
  modified_base 55..56: mod_base = OTHER; note = uracil
  modified_base 61: mod_base = OTHER; note = uracil
  modified_base 64: mod_base = OTHER; note = uracil
  modified_base 69: mod_base = OTHER; note = uracil
  modified_base 72..74: mod_base = OTHER; note = uracil
  modified_base 77..79: mod_base = OTHER; note = uracil
  modified_base 84..85: mod_base = OTHER; note = uracil
  modified_base 87: mod_base = OTHER; note = uracil
  modified_base 89..92: mod_base = OTHER; note = uracil
  modified_base 95..97: mod_base = OTHER; note = uracil
  modified_base 99: mod_base = OTHER; note = uracil
  modified_base 101: mod_base = OTHER; note = uracil
  modified_base 107..108: mod_base = OTHER; note = uracil
  modified_base 114: mod_base = OTHER; note = uracil
  modified_base 123..125: mod_base = OTHER; note = uracil
  modified_base 134..136: mod_base = OTHER; note = uracil
  modified_base 146: mod_base = OTHER; note = uracil
  modified_base 160..163: mod_base = OTHER; note = uracil
  modified_base 166..167: mod_base = OTHER; note = uracil
  modified_base 181: mod_base = OTHER; note = uracil
  modified_base 190..191: mod_base = OTHER; note = uracil
  modified_base 193: mod_base = OTHER; note = uracil
  modified_base 203: mod_base = OTHER; note = uracil
  modified_base 205: mod_base = OTHER; note = uracil
  modified_base 213..214: mod_base = OTHER; note = uracil
  modified_base 219: mod_base = OTHER; note = uracil
  modified_base 224: mod_base = OTHER; note = uracil
  modified_base 226: mod_base = OTHER; note = uracil
  modified_base 231: mod_base = OTHER; note = uracil
  modified_base 237..238: mod_base = OTHER; note = uracil
  modified_base 242..243: mod_base = OTHER; note = uracil
  modified_base 249: mod_base = OTHER; note = uracil
  modified_base 251: mod_base = OTHER; note = uracil
  modified_base 254: mod_base = OTHER; note = uracil
  modified_base 257..258: mod_base = OTHER; note = uracil
  modified_base 261: mod_base = OTHER; note = uracil
  modified_base 268..270: mod_base = OTHER; note = uracil
  modified_base 274..275: mod_base = OTHER; note = uracil
  modified_base 278: mod_base = OTHER; note = uracil
  modified_base 280..281: mod_base = OTHER; note = uracil
  modified_base 292: mod_base = OTHER; note = uracil
  modified_base 300: mod_base = OTHER; note = uracil
  modified_base 10: mod_base = m5c
  modified_base 18: mod_base = m5c
  modified_base 25: mod_base = m5c
  modified_base 32: mod_base = m5c
  modified_base 37: mod_base = m5c
  modified_base 46: mod_base = m5c
  modified_base 75: mod_base = m5c
  modified_base 115: mod_base = m5c
  modified_base 126: mod_base = m5c
  modified_base 141: mod_base = m5c
  modified_base 187: mod_base = m5c
  modified_base 208: mod_base = m5c
  modified_base 210: mod_base = m5c
  modified_base 215: mod_base = m5c
  modified_base 229: mod_base = m5c
  modified_base 252: mod_base = m5c
  modified_base 259: mod_base = m5c
  modified_base 265: mod_base = m5c
  modified_base 276: mod_base = m5c
  modified_base 286: mod_base = m5c
  modified_base 293: mod_base = m5c
  modified_base 295: mod_base = m5c
  modified_base 297: mod_base = m5c
  variation 150: note = CpG site, residue is C if methylated or T(=U) if unmethylated
ggaggtaaacgggaattcggttggcgggttgcgagtcggtagggacgttggggtttagggttgttggatagtttcgttttgtatttttttttattttttatttaattttgggttcgaaatagtttcgggtaattttagggcgaggtagtygggaattaattttagttttgaagtaagagatagaggcgtttatagaagagggttttgcgcgtttcggattggatatagcgtagagtttattttagggatatcgtaattcgtaagcgatttaggttcgttttagggcgggattcgcgcggt

SEQ ID NO: 442 - DNA, 300 bp, synthetic construct
  source 1..300: mol_type = other DNA
  modified_base 2: mod_base = OTHER; note = uracil
  modified_base 12..13: mod_base = OTHER; note = uracil
  modified_base 16..18: mod_base = OTHER; note = uracil
  modified_base 28..29: mod_base = OTHER; note = uracil
  modified_base 37: mod_base = OTHER; note = uracil
  modified_base 54..56: mod_base = OTHER; note = uracil
  modified_base 66: mod_base = OTHER; note = uracil
  modified_base 68: mod_base = OTHER; note = uracil
  modified_base 73: mod_base = OTHER; note = uracil
  modified_base 79..80: mod_base = OTHER; note = uracil
  modified_base 84: mod_base = OTHER; note = uracil
  modified_base 94: mod_base = OTHER; note = uracil
  modified_base 99..101: mod_base = OTHER; note = uracil
  modified_base 103: mod_base = OTHER; note = uracil
  modified_base 106: mod_base = OTHER; note = uracil
  modified_base 115..116: mod_base = OTHER; note = uracil
  modified_base 118: mod_base = OTHER; note = uracil
  modified_base 122: mod_base = OTHER; note = uracil
  modified_base 124: mod_base = OTHER; note = uracil
  modified_base 128: mod_base = OTHER; note = uracil
  modified_base 131: mod_base = OTHER; note = uracil
  modified_base 136: mod_base = OTHER; note = uracil
  modified_base 148..149: mod_base = OTHER; note = uracil
  modified_base 153: mod_base = OTHER; note = uracil
  modified_base 156..157: mod_base = OTHER; note = uracil
  modified_base 161..163: mod_base = OTHER; note = uracil
  modified_base 172..173: mod_base = OTHER; note = uracil
  modified_base 179: mod_base = OTHER; note = uracil
  modified_base 189..191: mod_base = OTHER; note = uracil
  modified_base 220: mod_base = OTHER; note = uracil
  modified_base 230: mod_base = OTHER; note = uracil
  modified_base 234..235: mod_base = OTHER; note = uracil
  modified_base 238: mod_base = OTHER; note = uracil
  modified_base 241..243: mod_base = OTHER; note = uracil
  modified_base 248..251: mod_base = OTHER; note = uracil
  modified_base 257..259: mod_base = OTHER; note = uracil
  modified_base 262: mod_base = OTHER; note = uracil
  modified_base 266: mod_base = OTHER; note = uracil
  modified_base 270: mod_base = OTHER; note = uracil
  modified_base 273..274: mod_base = OTHER; note = uracil
  modified_base 277..278: mod_base = OTHER; note = uracil
  modified_base 281: mod_base = OTHER; note = uracil
  modified_base 288..289: mod_base = OTHER; note = uracil
  modified_base 296..297: mod_base = OTHER; note = uracil
  modified_base 299..300: mod_base = OTHER; note = uracil
  modified_base 3: mod_base = m5c
  modified_base 5: mod_base = m5c
  modified_base 7: mod_base = m5c
  modified_base 14: mod_base = m5c
  modified_base 24: mod_base = m5c
  modified_base 35: mod_base = m5c
  modified_base 41: mod_base = m5c
  modified_base 48: mod_base = m5c
  modified_base 71: mod_base = m5c
  modified_base 85: mod_base = m5c
  modified_base 90: mod_base = m5c
  modified_base 92: mod_base = m5c
  modified_base 113: mod_base = m5c
  modified_base 159: mod_base = m5c
  modified_base 174: mod_base = m5c
  modified_base 185: mod_base = m5c
  modified_base 225: mod_base = m5c
  modified_base 254: mod_base = m5c
  modified_base 263: mod_base = m5c
  modified_base 268: mod_base = m5c
  modified_base 275: mod_base = m5c
  modified_base 282: mod_base = m5c
  modified_base 290: mod_base = m5c
  variation 150: note = CpG site, residue is C if methylated or T(=U) if unmethylated
gtcgcgcggatttcgttttggagcgggtttgggtcgtttgcgggttgcggtgtttttggaatggattttgcgttgtgtttagttcgggacgcgtagagtttttttttgtggacgtttttgttttttattttaaggttggggttaattttygattgtttcgttttgggattattcggggttatttcggatttaggattaagtgagggatggggagaggtatagggcggggttgtttagtagttttggattttagcgtttttatcggttcgtagttcgttagtcgggttttcgtttgttttt

SEQ ID NO: 443 - DNA, 300 bp, synthetic construct
  source 1..300: mol_type = other DNA
  modified_base 1: mod_base = OTHER; note = uracil
  modified_base 7: mod_base = OTHER; note = uracil
  modified_base 24..25: mod_base = OTHER; note = uracil
  modified_base 31: mod_base = OTHER; note = uracil
  modified_base 34: mod_base = OTHER; note = uracil
  modified_base 36: mod_base = OTHER; note = uracil
  modified_base 41: mod_base = OTHER; note = uracil
  modified_base 45: mod_base = OTHER; note = uracil
  modified_base 54: mod_base = OTHER; note = uracil
  modified_base 67: mod_base = OTHER; note = uracil
  modified_base 93: mod_base = OTHER; note = uracil
  modified_base 96: mod_base = OTHER; note = uracil
  modified_base 101: mod_base = OTHER; note = uracil
  modified_base 109..110: mod_base = OTHER; note = uracil
  modified_base 121..122: mod_base = OTHER; note = uracil
  modified_base 127: mod_base = OTHER; note = uracil
  modified_base 130: mod_base = OTHER; note = uracil
  modified_base 133: mod_base = OTHER; note = uracil
  modified_base 149: mod_base = OTHER; note = uracil
  modified_base 154: mod_base = OTHER; note = uracil
  modified_base 164..165: mod_base = OTHER; note = uracil
  modified_base 173: mod_base = OTHER; note = uracil
  modified_base 185: mod_base = OTHER; note = uracil
  modified_base 203: mod_base = OTHER; note = uracil
  modified_base 209: mod_base = OTHER; note = uracil
  modified_base 212: mod_base = OTHER; note = uracil
  modified_base 223: mod_base = OTHER; note = uracil
  modified_base 226: mod_base = OTHER; note = uracil
  modified_base 229: mod_base = OTHER; note = uracil
  modified_base 237: mod_base = OTHER; note = uracil
  modified_base 249: mod_base = OTHER; note = uracil
  modified_base 255: mod_base = OTHER; note = uracil
  modified_base 266..267: mod_base = OTHER; note = uracil
  modified_base 282: mod_base = OTHER; note = uracil
  modified_base 288..291: mod_base = OTHER; note = uracil
  modified_base 295..296: mod_base = OTHER; note = uracil
  modified_base 22: mod_base = m5c
  modified_base 111: mod_base = m5c
  modified_base 186: mod_base = m5c
  modified_base 252: mod_base = m5c
  modified_base 258: mod_base = m5c
  variation 151: note = CpG site, residue is C if methylated or T(=U) if unmethylated
tatgtgttgagatggagaaggcgttagtgttagtattagataggttgagatgttaagtggaaatgttaaggaggtggtggaggtggtgggagttgtagggttgtgaggttcgggagagggttagagttgtagttttaaattggagggttayggtatgtggaggttaaggaagtagatgggatgttcggggagagagtatggattgaagtagttaaagaattgtagtatttaatggataggaagaggggtagcgatagcgatggagtttgagaaggagggtgtagtgtttttaagttatgt

SEQ ID NO: 444 - DNA, 300 bp, synthetic construct
  source 1..300: mol_type = other DNA
  modified_base 2: mod_base = OTHER; note = uracil
  modified_base 7: mod_base = OTHER; note = uracil
  modified_base 15: mod_base = OTHER; note = uracil
  modified_base 17: mod_base = OTHER; note = uracil
  modified_base 20: mod_base = OTHER; note = uracil
  modified_base 22..24: mod_base = OTHER; note = uracil
  modified_base 26..27: mod_base = OTHER; note = uracil
  modified_base 30: mod_base = OTHER; note = uracil
  modified_base 32: mod_base = OTHER; note = uracil
  modified_base 36: mod_base = OTHER; note = uracil
  modified_base 38..39: mod_base = OTHER; note = uracil
  modified_base 44: mod_base = OTHER; note = uracil
  modified_base 50: mod_base = OTHER; note = uracil
  modified_base 53..56: mod_base = OTHER; note = uracil
  modified_base 58: mod_base = OTHER; note = uracil
  modified_base 61..62: mod_base = OTHER; note = uracil
  modified_base 66..67: mod_base = OTHER; note = uracil
  modified_base 76: mod_base = OTHER; note = uracil
  modified_base 79: mod_base = OTHER; note = uracil
  modified_base 84: mod_base = OTHER; note = uracil
  modified_base 90: mod_base = OTHER; note = uracil
  modified_base 93: mod_base = OTHER; note = uracil
  modified_base 96: mod_base = OTHER; note = uracil
  modified_base 100..101: mod_base = OTHER; note = uracil
  modified_base 105: mod_base = OTHER; note = uracil
  modified_base 107: mod_base = OTHER; note = uracil
  modified_base 109: mod_base = OTHER; note = uracil
  modified_base 111..113: mod_base = OTHER; note = uracil
  modified_base 118: mod_base = OTHER; note = uracil
  modified_base 121..123: mod_base = OTHER; note = uracil
  modified_base 126: mod_base = OTHER; note = uracil
  modified_base 129: mod_base = OTHER; note = uracil
  modified_base 132..133: mod_base = OTHER; note = uracil
  modified_base 138..139: mod_base = OTHER; note = uracil
  modified_base 141..142: mod_base = OTHER; note = uracil
  modified_base 144: mod_base = OTHER; note = uracil
  modified_base 148: mod_base = OTHER; note = uracil
  modified_base 154..156: mod_base = OTHER; note = uracil
  modified_base 158..159: mod_base = OTHER; note = uracil
  modified_base 169: mod_base = OTHER; note = uracil
  modified_base 172: mod_base = OTHER; note = uracil
  modified_base 175: mod_base = OTHER; note = uracil
  modified_base 177: mod_base = OTHER; note = uracil
  modified_base 181..183: mod_base = OTHER; note = uracil
  modified_base 185: mod_base = OTHER; note = uracil
  modified_base 187..188: mod_base = OTHER; note = uracil
  modified_base 193..194: mod_base = OTHER; note = uracil
  modified_base 196: mod_base = OTHER; note = uracil
  modified_base 198: mod_base = OTHER; note = uracil
  modified_base 201..203: mod_base = OTHER; note = uracil
  modified_base 206: mod_base = OTHER; note = uracil
  modified_base 209: mod_base = OTHER; note = uracil
  modified_base 211..213: mod_base = OTHER; note = uracil
  modified_base 215..216: mod_base = OTHER; note = uracil
  modified_base 218..219: mod_base = OTHER; note = uracil
  modified_base 221..222: mod_base = OTHER; note = uracil
  modified_base 224..225: mod_base = OTHER; note = uracil
  modified_base 227..228: mod_base = OTHER; note = uracil
  modified_base 230..231: mod_base = OTHER; note = uracil
  modified_base 236: mod_base = OTHER; note = uracil
  modified_base 241..242: mod_base = OTHER; note = uracil
  modified_base 244: mod_base = OTHER; note = uracil
  modified_base 249: mod_base = OTHER; note = uracil
  modified_base 252: mod_base = OTHER; note = uracil
  modified_base 254: mod_base = OTHER; note = uracil
  modified_base 257..258: mod_base = OTHER; note = uracil
  modified_base 262: mod_base = OTHER; note = uracil
  modified_base 268: mod_base = OTHER; note = uracil
  modified_base 272: mod_base = OTHER; note = uracil
  modified_base 274: mod_base = OTHER; note = uracil
  modified_base 280..281: mod_base = OTHER; note = uracil
  modified_base 284: mod_base = OTHER; note = uracil
  modified_base 286..287: mod_base = OTHER; note = uracil
  modified_base 290: mod_base = OTHER; note = uracil
  modified_base 292: mod_base = OTHER; note = uracil
  modified_base 295: mod_base = OTHER; note = uracil
  modified_base 297: mod_base = OTHER; note = uracil
  modified_base 42: mod_base = m5c
  modified_base 48: mod_base = m5c
  modified_base 114: mod_base = m5c
  modified_base 189: mod_base = m5c
  modified_base 278: mod_base = m5c
  variation 149: note = CpG site, residue is C if methylated or T(=U) if unmethylated
atatggtttggggatattgtatttttttttttaggttttatcgttgtcgttgtttttttttttgtttattagatgttgtaattttttagttgttttagtttatatttttttttcggatattttatttgtttttttggtttttatatgtygtgattttttaatttaaagttgtagttttggttttttttcgggttttatagttttgtagtttttattatttttattatttttttgatatttttatttgatattttagtttgtttagtgttgatattggcgttttttttattttagtatatg

SEQ ID NO: 445 - DNA, 300 bp, synthetic construct
  source 1..300: mol_type = other DNA
  modified_base 1..3: mod_base = OTHER; note = uracil
  modified_base 5: mod_base = OTHER; note = uracil
  modified_base 17: mod_base = OTHER; note = uracil
  modified_base 23: mod_base = OTHER; note = uracil
  modified_base 26: mod_base = OTHER; note = uracil
  modified_base 36: mod_base = OTHER; note = uracil
  modified_base 41..42: mod_base = OTHER; note = uracil
  modified_base 45: mod_base = OTHER; note = uracil
  modified_base 48: mod_base = OTHER; note = uracil
  modified_base 54..55: mod_base = OTHER; note = uracil
  modified_base 57: mod_base = OTHER; note = uracil
  modified_base 60..61: mod_base = OTHER; note = uracil
  modified_base 66: mod_base = OTHER; note = uracil
  modified_base 70..71: mod_base = OTHER; note = uracil
  modified_base 76: mod_base = OTHER; note = uracil
  modified_base 79: mod_base = OTHER; note = uracil
  modified_base 81: mod_base = OTHER; note = uracil
  modified_base 83: mod_base = OTHER; note = uracil
  modified_base 93: mod_base = OTHER; note = uracil
  modified_base 96: mod_base = OTHER; note = uracil
  modified_base 98: mod_base = OTHER; note = uracil
  modified_base 107: mod_base = OTHER; note = uracil
  modified_base 112..113: mod_base = OTHER; note = uracil
  modified_base 118: mod_base = OTHER; note = uracil
  modified_base 126: mod_base = OTHER; note = uracil
  modified_base 128: mod_base = OTHER; note = uracil
  modified_base 130: mod_base = OTHER; note = uracil
  modified_base 134: mod_base = OTHER; note = uracil
  modified_base 137: mod_base = OTHER; note = uracil
  modified_base 139..140: mod_base = OTHER; note = uracil
  modified_base 142: mod_base = OTHER; note = uracil
  modified_base 149: mod_base = OTHER; note = uracil
  modified_base 152..153: mod_base = OTHER; note = uracil
  modified_base 156: mod_base = OTHER; note = uracil
  modified_base 160..162: mod_base = OTHER; note = uracil
  modified_base 166..168: mod_base = OTHER; note = uracil
  modified_base 170: mod_base = OTHER; note = uracil
  modified_base 182: mod_base = OTHER; note = uracil
  modified_base 188..191: mod_base = OTHER; note = uracil
  modified_base 195: mod_base = OTHER; note = uracil
  modified_base 198: mod_base = OTHER; note = uracil
  modified_base 208: mod_base = OTHER; note = uracil
  modified_base 214: mod_base = OTHER; note = uracil
  modified_base 218: mod_base = OTHER; note = uracil
  modified_base 225: mod_base = OTHER; note = uracil
  modified_base 232: mod_base = OTHER; note = uracil
  modified_base 235: mod_base = OTHER; note = uracil
  modified_base 238: mod_base = OTHER; note = uracil
  modified_base 240: mod_base = OTHER; note = uracil
  modified_base 249: mod_base = OTHER; note = uracil
  modified_base 259: mod_base = OTHER; note = uracil
  modified_base 272: mod_base = OTHER; note = uracil
  modified_base 275..277: mod_base = OTHER; note = uracil
  modified_base 282: mod_base = OTHER; note = uracil
  modified_base 24: mod_base = m5c
  modified_base 90: mod_base = m5c
  modified_base 116: mod_base = m5c
  modified_base 121: mod_base = m5c
  modified_base 157: mod_base = m5c
  modified_base 241: mod_base = m5c
  modified_base 243: mod_base = m5c
  modified_base 264: mod_base = m5c
  modified_base 270: mod_base = m5c
  modified_base 273: mod_base = m5c
  modified_base 285: mod_base = m5c
  variation 150: note = CpG site, residue is C if methylated or T(=U) if unmethylated
tttttaggtttggtttttgttgtcgttgttgtttttttttttaatattataagttttttttttatttttttatgtttgtatataggaagcggtattatttgttttttatgttttgcgtatcgaggtatattttttgtttttttttgtgtygttagtcggtttaggtttatagatggtaggatttgtgttttaggttgttgtgtgagttagagttaggtaggaagtaaatggtaattttatcgcggtgattgaggaatgtttaacgaaggcgtcgtttttgataacggtgtgggttggtaa

SEQ ID NO: 446 - DNA, 300 bp, synthetic construct
  source 1..300: mol_type = other DNA
  modified_base 4..5: mod_base = OTHER; note = uracil
  modified_base 8..10: mod_base = OTHER; note = uracil
  modified_base 12: mod_base = OTHER; note = uracil
  modified_base 14: mod_base = OTHER; note = uracil
  modified_base 21: mod_base = OTHER; note = uracil
  modified_base 32..33: mod_base = OTHER; note = uracil
  modified_base 43: mod_base = OTHER; note = uracil
  modified_base 47..48: mod_base = OTHER; note = uracil
  modified_base 50: mod_base = OTHER; note = uracil
  modified_base 54: mod_base = OTHER; note = uracil
  modified_base 56: mod_base = OTHER; note = uracil
  modified_base 70..71: mod_base = OTHER; note = uracil
  modified_base 77: mod_base = OTHER; note = uracil
  modified_base 80..81: mod_base = OTHER; note = uracil
  modified_base 84..85: mod_base = OTHER; note = uracil
  modified_base 89: mod_base = OTHER; note = uracil
  modified_base 91: mod_base = OTHER; note = uracil
  modified_base 95: mod_base = OTHER; note = uracil
  modified_base 97: mod_base = OTHER; note = uracil
  modified_base 99: mod_base = OTHER; note = uracil
  modified_base 101: mod_base = OTHER; note = uracil
  modified_base 104: mod_base = OTHER; note = uracil
  modified_base 107..108: mod_base = OTHER; note = uracil
  modified_base 114: mod_base = OTHER; note = uracil
  modified_base 116: mod_base = OTHER; note = uracil
  modified_base 121..122: mod_base = OTHER; note = uracil
  modified_base 125..126: mod_base = OTHER; note = uracil
  modified_base 129: mod_base = OTHER; note = uracil
  modified_base 136..137: mod_base = OTHER; note = uracil
  modified_base 142: mod_base = OTHER; note = uracil
  modified_base 146: mod_base = OTHER; note = uracil
  modified_base 153: mod_base = OTHER; note = uracil
  modified_base 155: mod_base = OTHER; note = uracil
  modified_base 165: mod_base = OTHER; note = uracil
  modified_base 176..177: mod_base = OTHER; note = uracil
  modified_base 186: mod_base = OTHER; note = uracil
  modified_base 191: mod_base = OTHER; note = uracil
  modified_base 200: mod_base = OTHER; note = uracil
  modified_base 209: mod_base = OTHER; note = uracil
  modified_base 212: mod_base = OTHER; note = uracil
  modified_base 215..216: mod_base = OTHER; note = uracil
  modified_base 223: mod_base = OTHER; note = uracil
  modified_base 227: mod_base = OTHER; note = uracil
  modified_base 248: mod_base = OTHER; note = uracil
  modified_base 270: mod_base = OTHER; note = uracil
  modified_base 273: mod_base = OTHER; note = uracil
  modified_base 279: mod_base = OTHER; note = uracil
  modified_base 282: mod_base = OTHER; note = uracil
  modified_base 288..289: mod_base = OTHER; note = uracil
  modified_base 293..294: mod_base = OTHER; note = uracil
  modified_base 15: mod_base = m5c
  modified_base 27: mod_base = m5c
  modified_base 30: mod_base = m5c
  modified_base 36: mod_base = m5c
  modified_base 57: mod_base = m5c
  modified_base 59: mod_base = m5c
  modified_base 143: mod_base = m5c
  modified_base 179: mod_base = m5c
  modified_base 184: mod_base = m5c
  modified_base 210: mod_base = m5c
  modified_base 276: mod_base = m5c
  variation 150: note = CpG site, residue is C if methylated or T(=U) if unmethylated
ttattaatttatatcgttgttaagggcggcgttttcgttaagtattttttagttatcgcggtgaagttgttatttgttttttgtttgattttgatttatatagtagtttggggtataagttttattatttgtgggtttgggtcggttggyggtataaagaggagtagaaagtgtgtttcgatgcgtaggatatgaaaaataagtgatgtcgttttttgtgtgtagatatggaaagataaggaagaggtttatgatgttggaaaagaaaataatagcggtaatagaaattaaatttgaggg

SEQ ID NO: 447 - DNA, 300 bp, synthetic construct
  source 1..300: mol_type = other DNA
  modified_base 3: mod_base = OTHER; note = uracil
  modified_base 5..6: mod_base = OTHER; note = uracil
  modified_base 8: mod_base = OTHER; note = uracil
  modified_base 15: mod_base = OTHER; note = uracil
  modified_base 18..19: mod_base = OTHER; note = uracil
  modified_base 22: mod_base = OTHER; note = uracil
  modified_base 26..28: mod_base = OTHER; note = uracil
  modified_base 32..34: mod_base = OTHER; note = uracil
  modified_base 36: mod_base = OTHER; note = uracil
  modified_base 48: mod_base = OTHER; note = uracil
  modified_base 54..57: mod_base = OTHER; note = uracil
  modified_base 61: mod_base = OTHER; note = uracil
  modified_base 64: mod_base = OTHER; note = uracil
  modified_base 74: mod_base = OTHER; note = uracil
  modified_base 80: mod_base = OTHER; note = uracil
  modified_base 84: mod_base = OTHER; note = uracil
  modified_base 91: mod_base = OTHER; note = uracil
  modified_base 98: mod_base = OTHER; note = uracil
  modified_base 101: mod_base = OTHER; note = uracil
  modified_base 104: mod_base = OTHER; note = uracil
  modified_base 106: mod_base = OTHER; note = uracil
  modified_base 115: mod_base = OTHER; note = uracil
  modified_base 125: mod_base = OTHER; note = uracil
  modified_base 138: mod_base = OTHER; note = uracil
  modified_base 141..143: mod_base = OTHER; note = uracil
  modified_base 148: mod_base = OTHER; note = uracil
  modified_base 174: mod_base = OTHER; note = uracil
  modified_base 177: mod_base = OTHER; note = uracil
  modified_base 184..186: mod_base = OTHER; note = uracil
  modified_base 189: mod_base = OTHER; note = uracil
  modified_base 194: mod_base = OTHER; note = uracil
  modified_base 200: mod_base = OTHER; note = uracil
  modified_base 203..204: mod_base = OTHER; note = uracil
  modified_base 206: mod_base = OTHER; note = uracil
  modified_base 215: mod_base = OTHER; note = uracil
  modified_base 219: mod_base = OTHER; note = uracil
  modified_base 224: mod_base = OTHER; note = uracil
  modified_base 231: mod_base = OTHER; note = uracil
  modified_base 237: mod_base = OTHER; note = uracil
  modified_base 239: mod_base = OTHER; note = uracil
  modified_base 246..247: mod_base = OTHER; note = uracil
  modified_base 251..252: mod_base = OTHER; note = uracil
  modified_base 258: mod_base = OTHER; note = uracil
  modified_base 263: mod_base = OTHER; note = uracil
  modified_base 275..276: mod_base = OTHER; note = uracil
  modified_base 278..279: mod_base = OTHER; note = uracil
  modified_base 286..287: mod_base = OTHER; note = uracil
  modified_base 294: mod_base = OTHER; note = uracil
  modified_base 299: mod_base = OTHER; note = uracil
  modified_base 16: mod_base = m5c
  modified_base 23: mod_base = m5c
  modified_base 107: mod_base = m5c
  modified_base 109: mod_base = m5c
  modified_base 130: mod_base = m5c
  modified_base 136: mod_base = m5c
  modified_base 139: mod_base = m5c
  modified_base 178: mod_base = m5c
  modified_base 192: mod_base = m5c
  modified_base 195: mod_base = m5c
  modified_base 201: mod_base = m5c
  modified_base 207: mod_base = m5c
  modified_base 264: mod_base = m5c
  variation 151: note = CpG site, residue is C if methylated or T(=U) if unmethylated
tgtttttttttgtgtcgttagtcggtttaggtttatagatggtaggatttgtgttttaggttgttgtgtgagttagagttaggtaggaagtaaatggtaattttatcgcggtgattgaggaatgtttaacgaaggcgtcgtttttgataayggtgtgggttggtaaaaggaaatagtcgggagttttgtagcgtcggtgtcgttatcgtttagtttgattgtgtatttgattaagttataagaggttaggtttgtgatttgttcgagggaaaaattattagaaaattaggtgtttgggtt

SEQ ID NO: 448 - DNA, 300 bp, synthetic construct
  source 1..300: mol_type = other DNA
  modified_base 3..5: mod_base = OTHER; note = uracil
  modified_base 9: mod_base = OTHER; note = uracil
  modified_base 11..12: mod_base = OTHER; note = uracil
  modified_base 20: mod_base = OTHER; note = uracil
  modified_base 32..34: mod_base = OTHER; note = uracil
  modified_base 40: mod_base = OTHER; note = uracil
  modified_base 45: mod_base = OTHER; note = uracil
  modified_base 47: mod_base = OTHER; note = uracil
  modified_base 51..52: mod_base = OTHER; note = uracil
  modified_base 56..57: mod_base = OTHER; note = uracil
  modified_base 59: mod_base = OTHER; note = uracil
  modified_base 66: mod_base = OTHER; note = uracil
  modified_base 72: mod_base = OTHER; note = uracil
  modified_base 78: mod_base = OTHER; note = uracil
  modified_base 80: mod_base = OTHER; note = uracil
  modified_base 84: mod_base = OTHER; note = uracil
  modified_base 88: mod_base = OTHER; note = uracil
  modified_base 102: mod_base = OTHER; note = uracil
  modified_base 104: mod_base = OTHER; note = uracil
  modified_base 110: mod_base = OTHER; note = uracil
  modified_base 113: mod_base = OTHER; note = uracil
  modified_base 118: mod_base = OTHER; note = uracil
  modified_base 120..121: mod_base = OTHER; note = uracil
  modified_base 125: mod_base = OTHER; note = uracil
  modified_base 131..132: mod_base = OTHER; note = uracil
  modified_base 138..139: mod_base = OTHER; note = uracil
  modified_base 142..144: mod_base = OTHER; note = uracil
  modified_base 146: mod_base = OTHER; note = uracil
  modified_base 148: mod_base = OTHER; note = uracil
  modified_base 155: mod_base = OTHER; note = uracil
  modified_base 166..167: mod_base = OTHER; note = uracil
  modified_base 177: mod_base = OTHER; note = uracil
  modified_base 181..182: mod_base = OTHER; note = uracil
  modified_base 184: mod_base = OTHER; note = uracil
  modified_base 188: mod_base = OTHER; note = uracil
  modified_base 190: mod_base = OTHER; note = uracil
  modified_base 204..205: mod_base = OTHER; note = uracil
  modified_base 211: mod_base = OTHER; note = uracil
  modified_base 214..215: mod_base = OTHER; note = uracil
  modified_base 218..219: mod_base = OTHER; note = uracil
  modified_base 223: mod_base = OTHER; note = uracil
  modified_base 225: mod_base = OTHER; note = uracil
  modified_base 229: mod_base = OTHER; note = uracil
  modified_base 231: mod_base = OTHER; note = uracil
  modified_base 233: mod_base = OTHER; note = uracil
  modified_base 235: mod_base = OTHER; note = uracil
  modified_base 238: mod_base = OTHER; note = uracil
  modified_base 241..242: mod_base = OTHER; note = uracil
  modified_base 248: mod_base = OTHER; note = uracil
  modified_base 250: mod_base = OTHER; note = uracil
  modified_base 255..256: mod_base = OTHER; note = uracil
  modified_base 259..260: mod_base = OTHER; note = uracil
  modified_base 263: mod_base = OTHER; note = uracil
  modified_base 270..271: mod_base = OTHER; note = uracil
  modified_base 276: mod_base = OTHER; note = uracil
  modified_base 280: mod_base = OTHER; note = uracil
  modified_base 287: mod_base = OTHER; note = uracil
  modified_base 289: mod_base = OTHER; note = uracil
  modified_base 299: mod_base = OTHER; note = uracil
  modified_base 36: mod_base = m5c
  modified_base 93: mod_base = m5c
  modified_base 99: mod_base = m5c
  modified_base 105: mod_base = m5c
  modified_base 108: mod_base = m5c
  modified_base 122: mod_base = m5c
  modified_base 161: mod_base = m5c
  modified_base 164: mod_base = m5c
  modified_base 170: mod_base = m5c
  modified_base 191: mod_base = m5c
  modified_base 193: mod_base = m5c
  modified_base 277: mod_base = m5c
  modified_base 284: mod_base = m5c
  variation 149: note = CpG site, residue is C if methylated or T(=U) if unmethylated
agtttagatatttggttttttggtggtttttttttcggataagttataggtttggttttttgtgatttagttaaatgtatagttagattaaacggtggcggtatcggcgttgtagggttttcggttgtttttttttattaatttatatygttgttaagggcggcgttttcgttaagtattttttagttatcgcggtgaagttgttatttgttttttgtttgattttgatttatatagtagtttggggtataagttttattatttgtgggtttgggtcggttggcggtataaagaggagta

SEQ ID NO: 449 - DNA, 300 bp, synthetic construct
  source 1..300: mol_type = other DNA
  modified_base 1: mod_base = OTHER; note = uracil
  modified_base 6: mod_base = OTHER; note = uracil
  modified_base 8: mod_base = OTHER; note = uracil
  modified_base 14..15: mod_base = OTHER; note = uracil
  modified_base 17: mod_base = OTHER; note = uracil
  modified_base 20: mod_base = OTHER; note = uracil
  modified_base 25: mod_base = OTHER; note = uracil
  modified_base 41: mod_base = OTHER; note = uracil
  modified_base 44: mod_base = OTHER; note = uracil
  modified_base 47: mod_base = OTHER; note = uracil
  modified_base 53: mod_base = OTHER; note = uracil
  modified_base 56: mod_base = OTHER; note = uracil
  modified_base 65: mod_base = OTHER; note = uracil
  modified_base 70: mod_base = OTHER; note = uracil
  modified_base 72: mod_base = OTHER; note = uracil
  modified_base 76: mod_base = OTHER; note = uracil
  modified_base 78..79: mod_base = OTHER; note = uracil
  modified_base 84: mod_base = OTHER; note = uracil
  modified_base 86: mod_base = OTHER; note = uracil
  modified_base 91: mod_base = OTHER; note = uracil
  modified_base 110: mod_base = OTHER; note = uracil
  modified_base 116: mod_base = OTHER; note = uracil
  modified_base 120..121: mod_base = OTHER; note = uracil
  modified_base 126: mod_base = OTHER; note = uracil
  modified_base 132: mod_base = OTHER; note = uracil
  modified_base 141..143: mod_base = OTHER; note = uracil
  modified_base 148: mod_base = OTHER; note = uracil
  modified_base 154: mod_base = OTHER; note = uracil
  modified_base 164: mod_base = OTHER; note = uracil
  modified_base 168: mod_base = OTHER; note = uracil
  modified_base 170: mod_base = OTHER; note = uracil
  modified_base 172: mod_base = OTHER; note = uracil
  modified_base 177..178: mod_base = OTHER; note = uracil
  modified_base 192: mod_base = OTHER; note = uracil
  modified_base 197: mod_base = OTHER; note = uracil
  modified_base 199: mod_base = OTHER; note = uracil
  modified_base 204..205: mod_base = OTHER; note = uracil
  modified_base 212: mod_base = OTHER; note = uracil
  modified_base 214: mod_base = OTHER; note = uracil
  modified_base 218: mod_base = OTHER; note = uracil
  modified_base 220..223: mod_base = OTHER; note = uracil
  modified_base 226..227: mod_base = OTHER; note = uracil
  modified_base 237..238: mod_base = OTHER; note = uracil
  modified_base 240: mod_base = OTHER; note = uracil
  modified_base 243: mod_base = OTHER; note = uracil
  modified_base 245: mod_base = OTHER; note = uracil
  modified_base 248: mod_base = OTHER; note = uracil
  modified_base 252..253: mod_base = OTHER; note = uracil
  modified_base 265..266: mod_base = OTHER; note = uracil
  modified_base 268..269: mod_base = OTHER; note = uracil
  modified_base 271..272: mod_base = OTHER; note = uracil
  modified_base 277..280: mod_base = OTHER; note = uracil
  modified_base 287: mod_base = OTHER; note = uracil
  modified_base 291..292: mod_base = OTHER; note = uracil
  modified_base 26: mod_base = m5c
  modified_base 74: mod_base = m5c
  modified_base 107: mod_base = m5c
  modified_base 114: mod_base = m5c
  modified_base 122: mod_base = m5c
  modified_base 249: mod_base = m5c
  modified_base 273: mod_base = m5c
  variation 150: note = CpG site, residue is C if methylated or T(=U) if unmethylated
ttgtgtttaagagttattttttaatcggggtgggaggaagtagttttaggaattgttgagagagtagaatttacgttttagggtttagagtaggaggtagggtgtgcggtaagcgttggttcggatagaagtagagtgggttttggtttygggtaggatgtttttgatttatattttttgaggagagaaagttaagttttttgtttaatgtttttgtttttttttttagaaaaatgttttagttttttcggtttgaaggaatggttttttttcgggttttatgatttttttttgtgtggg

SEQ ID NO: 450 - DNA, 300 bp, synthetic construct
  source 1..300: mol_type = other DNA
  modified_base 1..3: mod_base = OTHER; note = uracil
  modified_base 5: mod_base = OTHER; note = uracil
  modified_base 7: mod_base = OTHER; note = uracil
  modified_base 18: mod_base = OTHER; note = uracil
  modified_base 25..26: mod_base = OTHER; note = uracil
  modified_base 37..38: mod_base = OTHER; note = uracil
  modified_base 42..43: mod_base = OTHER; note = uracil
  modified_base 46: mod_base = OTHER; note = uracil
  modified_base 50: mod_base = OTHER; note = uracil
  modified_base 59: mod_base = OTHER; note = uracil
  modified_base 65: mod_base = OTHER; note = uracil
  modified_base 72: mod_base = OTHER; note = uracil
  modified_base 85: mod_base = OTHER; note = uracil
  modified_base 91: mod_base = OTHER; note = uracil
  modified_base 98: mod_base = OTHER; note = uracil
  modified_base 105: mod_base = OTHER; note = uracil
  modified_base 110: mod_base = OTHER; note = uracil
  modified_base 114: mod_base = OTHER; note = uracil
  modified_base 116: mod_base = OTHER; note = uracil
  modified_base 118..119: mod_base = OTHER; note = uracil
  modified_base 121: mod_base = OTHER; note = uracil
  modified_base 135: mod_base = OTHER; note = uracil
  modified_base 141: mod_base = OTHER; note = uracil
  modified_base 144..145: mod_base = OTHER; note = uracil
  modified_base 148..149: mod_base = OTHER; note = uracil
  modified_base 155..156: mod_base = OTHER; note = uracil
  modified_base 161..163: mod_base = OTHER; note = uracil
  modified_base 165: mod_base = OTHER; note = uracil
  modified_base 167: mod_base = OTHER; note = uracil
  modified_base 170: mod_base = OTHER; note = uracil
  modified_base 173: mod_base = OTHER; note = uracil
  modified_base 177: mod_base = OTHER; note = uracil
  modified_base 182..183: mod_base = OTHER; note = uracil
  modified_base 188: mod_base = OTHER; note = uracil
  modified_base 192: mod_base = OTHER; note = uracil
  modified_base 195: mod_base = OTHER; note = uracil
  modified_base 197: mod_base = OTHER; note = uracil
  modified_base 199..201: mod_base = OTHER; note = uracil
  modified_base 204..205: mod_base = OTHER; note = uracil
  modified_base 207..208: mod_base = OTHER; note = uracil
  modified_base 211: mod_base = OTHER; note = uracil
  modified_base 213: mod_base = OTHER; note = uracil
  modified_base 218..220: mod_base = OTHER; note = uracil
  modified_base 234: mod_base = OTHER; note = uracil
  modified_base 237: mod_base = OTHER; note = uracil
  modified_base 239: mod_base = OTHER; note = uracil
  modified_base 241: mod_base = OTHER; note = uracil
  modified_base 243: mod_base = OTHER; note = uracil
  modified_base 246: mod_base = OTHER; note = uracil
  modified_base 251..252: mod_base = OTHER; note = uracil
  modified_base 258: mod_base = OTHER; note = uracil
  modified_base 261: mod_base = OTHER; note = uracil
  modified_base 264..265: mod_base = OTHER; note = uracil
  modified_base 267..269: mod_base = OTHER; note = uracil
  modified_base 271..273: mod_base = OTHER; note = uracil
  modified_base 288: mod_base = OTHER; note = uracil
  modified_base 290: mod_base = OTHER; note = uracil
  modified_base 296: mod_base = OTHER; note = uracil
  modified_base 298: mod_base = OTHER; note = uracil
  modified_base 27: mod_base = m5c
  modified_base 51: mod_base = m5c
  modified_base 178: mod_base = m5c
  modified_base 186: mod_base = m5c
  modified_base 193: mod_base = m5c
  modified_base 226: mod_base = m5c
  modified_base 274: mod_base = m5c
  variation 150: note = CpG site, residue is C if methylated or T(=U) if unmethylated
tttatataggaaagaattatggggttcgggaggaggttatttttttaggtcggaagagttgaggtatttttttggaaggggagatagagatattaggtaaagagtttagttttttttttttaggaaatgtgagttagaaatattttgttygagattagggtttattttgtttttgttcgggttagcgtttgtcgtatattttattttttgttttgagttttggagcgtgagttttgtttttttagtagtttttgaagttgtttttttttatttcggttaagaagtggtttttgagtatag

SEQ ID NO: 451 - DNA, 300 bp, synthetic construct
  source 1..300: mol_type = other DNA
  modified_base 15: mod_base = OTHER; note = uracil
  modified_base 21: mod_base = OTHER; note = uracil
  modified_base 25: mod_base = OTHER; note = uracil
  modified_base 27: mod_base = OTHER; note = uracil
  modified_base 31: mod_base = OTHER; note = uracil
  modified_base 33..35: mod_base = OTHER; note = uracil
  modified_base 39: mod_base = OTHER; note = uracil
  modified_base 47: mod_base = OTHER; note = uracil
  modified_base 59: mod_base = OTHER; note = uracil
  modified_base 64: mod_base = OTHER; note = uracil
  modified_base 66: mod_base = OTHER; note = uracil
  modified_base 68: mod_base = OTHER; note = uracil
  modified_base 71: mod_base = OTHER; note = uracil
  modified_base 75: mod_base = OTHER; note = uracil
  modified_base 77..78: mod_base = OTHER; note = uracil
  modified_base 80..81: mod_base = OTHER; note = uracil
  modified_base 83..84: mod_base = OTHER; note = uracil
  modified_base 91: mod_base = OTHER; note = uracil
  modified_base 95..96: mod_base = OTHER; note = uracil
  modified_base 100: mod_base = OTHER; note = uracil
  modified_base 102..103: mod_base = OTHER; note = uracil
  modified_base 106..107: mod_base = OTHER; note = uracil
  modified_base 109: mod_base = OTHER; note = uracil
  modified_base 112: mod_base = OTHER; note = uracil
  modified_base 115..116: mod_base = OTHER; note = uracil
  modified_base 124: mod_base = OTHER; note = uracil
  modified_base 130: mod_base = OTHER; note = uracil
  modified_base 133: mod_base = OTHER; note = uracil
  modified_base 137: mod_base = OTHER; note = uracil
  modified_base 139: mod_base = OTHER; note = uracil
  modified_base 141: mod_base = OTHER; note = uracil
  modified_base 143..144: mod_base = OTHER; note = uracil
  modified_base 146..147: mod_base = OTHER; note = uracil
  modified_base 151..152: mod_base = OTHER; note = uracil
  modified_base 156: mod_base = OTHER; note = uracil
  modified_base 194: mod_base = OTHER; note = uracil
  modified_base 196: mod_base = OTHER; note = uracil
  modified_base 205..206: mod_base = OTHER; note = uracil
  modified_base 215: mod_base = OTHER; note = uracil
  modified_base 221: mod_base = OTHER; note = uracil
  modified_base 223..224: mod_base = OTHER; note = uracil
  modified_base 228..229: mod_base = OTHER; note = uracil
  modified_base 237: mod_base = OTHER; note = uracil
  modified_base 240..241: mod_base = OTHER; note = uracil
  modified_base 244..245: mod_base = OTHER; note = uracil
  modified_base 247: mod_base = OTHER; note = uracil
  modified_base 250..251: mod_base = OTHER; note = uracil
  modified_base 253..255: mod_base = OTHER; note = uracil
  modified_base 262: mod_base = OTHER; note = uracil
  modified_base 271: mod_base = OTHER; note = uracil
  modified_base 281..282: mod_base = OTHER; note = uracil
  modified_base 284..285: mod_base = OTHER; note = uracil
  modified_base 287: mod_base = OTHER; note = uracil
  modified_base 289..290: mod_base = OTHER; note = uracil
  modified_base 294..295: mod_base = OTHER; note = uracil
  modified_base 298: mod_base = OTHER; note = uracil
  modified_base 23: mod_base = m5c
  modified_base 53: mod_base = m5c
  modified_base 61: mod_base = m5c
  modified_base 85: mod_base = m5c
  modified_base 153: mod_base = m5c
  modified_base 186: mod_base = m5c
  modified_base 217: mod_base = m5c
  modified_base 231: mod_base = m5c
  modified_base 242: mod_base = m5c
  modified_base 291: mod_base = m5c
  variation 149: note = CpG site, residue is C if methylated or T(=U) if unmethylated
ttttttttttgagatagagtttcgttttgttatttaggttggagtgtagtggcgtgatttcggtttattgtaagttttatttttcgggtttatgttatttttttgttttagttttttgagtatttgggattataggtatttattattaygttcggttaattttttttttttatttttagtggagacggggttttattgtgttagttaggatggtttcgattttttgatttcgtgattagttcgttttagttttttaaagtgttgggattataggtgtgagttattttattcggtttgtta

SEQ ID NO: 452 - DNA, 300 bp, synthetic construct
  source 1..300: mol_type = other DNA
  modified_base 3: mod_base = OTHER; note = uracil
  modified_base 7: mod_base = OTHER; note = uracil
  modified_base 20: mod_base = OTHER; note = uracil
  modified_base 22: mod_base = OTHER; note = uracil
  modified_base 24: mod_base = OTHER; note = uracil
  modified_base 26..27: mod_base = OTHER; note = uracil
  modified_base 34..36: mod_base = OTHER; note = uracil
  modified_base 39: mod_base = OTHER; note = uracil
  modified_base 41: mod_base = OTHER; note = uracil
  modified_base 51: mod_base = OTHER; note = uracil
  modified_base 61: mod_base = OTHER; note = uracil
  modified_base 66: mod_base = OTHER; note = uracil
  modified_base 74: mod_base = OTHER; note = uracil
  modified_base 87..88: mod_base = OTHER; note = uracil
  modified_base 91..92: mod_base = OTHER; note = uracil
  modified_base 96: mod_base = OTHER; note = uracil
  modified_base 100: mod_base = OTHER; note = uracil
  modified_base 102: mod_base = OTHER; note = uracil
  modified_base 110..112: mod_base = OTHER; note = uracil
  modified_base 116: mod_base = OTHER; note = uracil
  modified_base 118..119: mod_base = OTHER; note = uracil
  modified_base 121: mod_base = OTHER; note = uracil
  modified_base 145: mod_base = OTHER; note = uracil
  modified_base 164..165: mod_base = OTHER; note = uracil
  modified_base 172..174: mod_base = OTHER; note = uracil
  modified_base 180: mod_base = OTHER; note = uracil
  modified_base 182: mod_base = OTHER; note = uracil
  modified_base 189: mod_base = OTHER; note = uracil
  modified_base 195: mod_base = OTHER; note = uracil
  modified_base 206: mod_base = OTHER; note = uracil
  modified_base 212..213: mod_base = OTHER; note = uracil
  modified_base 226: mod_base = OTHER; note = uracil
  modified_base 230: mod_base = OTHER; note = uracil
  modified_base 237: mod_base = OTHER; note = uracil
  modified_base 244: mod_base = OTHER; note = uracil
  modified_base 248..249: mod_base = OTHER; note = uracil
  modified_base 251: mod_base = OTHER; note = uracil
  modified_base 254: mod_base = OTHER; note = uracil
  modified_base 256: mod_base = OTHER; note = uracil
  modified_base 258..259: mod_base = OTHER; note = uracil
  modified_base 262..263: mod_base = OTHER; note = uracil
  modified_base 271: mod_base = OTHER; note = uracil
  modified_base 281: mod_base = OTHER; note = uracil
  modified_base 283: mod_base = OTHER; note = uracil
  modified_base 287: mod_base = OTHER; note = uracil
  modified_base 289: mod_base = OTHER; note = uracil
  modified_base 300: mod_base = OTHER; note = uracil
  modified_base 8: mod_base = m5c
  modified_base 57: mod_base = m5c
  modified_base 68: mod_base = m5c
  modified_base 82: mod_base = m5c
  modified_base 113: mod_base = m5c
  modified_base 146: mod_base = m5c
  modified_base 214: mod_base = m5c
  modified_base 238: mod_base = m5c
  modified_base 246: mod_base = m5c
  modified_base 276: mod_base = m5c
  variation 150: note = CpG site, residue is C if methylated or T(=U) if unmethylated
agtaggtcgggtgaggtggtttatatttgtaattttagtattttgggaggttgaggcgggttgattacgaggttaggagatcgagattattttggttaatatagtgaaatttcgtttttattaaaaataaaaaaaaaaaattagtcgggygtggtggtgagtgtttgtagttttagatatttaggaagttgaggtaggagaatggtatgaattcgggaggtggagtttgtagtgagtcgagattacgttattgtattttagtttgggtgatagagcgagattttgttttaaaaaaaaaat

SEQ ID NO: 453 - DNA, 300 bp, synthetic construct
  source 1..300: mol_type = other DNA
  modified_base 4..5: mod_base = OTHER; note = uracil
  modified_base 7: mod_base = OTHER; note = uracil
  modified_base 21: mod_base = OTHER; note = uracil
  modified_base 28: mod_base = OTHER; note = uracil
  modified_base 42: mod_base = OTHER; note = uracil
  modified_base 49: mod_base = OTHER; note = uracil
  modified_base 55: mod_base = OTHER; note = uracil
  modified_base 59: mod_base = OTHER; note = uracil
  modified_base 69: mod_base = OTHER; note = uracil
  modified_base 71: mod_base = OTHER; note = uracil
  modified_base 73: mod_base = OTHER; note = uracil
  modified_base 82: mod_base = OTHER; note = uracil
  modified_base 90: mod_base = OTHER; note = uracil
  modified_base 99: mod_base = OTHER; note = uracil
  modified_base 102: mod_base = OTHER; note = uracil
  modified_base 104: mod_base = OTHER; note = uracil
  modified_base 114: mod_base = OTHER; note = uracil
  modified_base 117..118: mod_base = OTHER; note = uracil
  modified_base 126: mod_base = OTHER; note = uracil
  modified_base 136..137: mod_base = OTHER; note = uracil
  modified_base 154: mod_base = OTHER; note = uracil
  modified_base 156: mod_base = OTHER; note = uracil
  modified_base 159: mod_base = OTHER; note = uracil
  modified_base 161: mod_base = OTHER; note = uracil
  modified_base 174: mod_base = OTHER; note = uracil
  modified_base 179: mod_base = OTHER; note = uracil
  modified_base 183..184: mod_base = OTHER; note = uracil
  modified_base 190..191: mod_base = OTHER; note = uracil
  modified_base 195: mod_base = OTHER; note = uracil
  modified_base 202: mod_base = OTHER; note = uracil
  modified_base 205: mod_base = OTHER; note = uracil
  modified_base 207: mod_base = OTHER; note = uracil
  modified_base 226: mod_base = OTHER; note = uracil
  modified_base 231: mod_base = OTHER; note = uracil
  modified_base 254: mod_base = OTHER; note = uracil
  modified_base 257..259: mod_base = OTHER; note = uracil
  modified_base 267: mod_base = OTHER; note = uracil
  modified_base 271: mod_base = OTHER; note = uracil
  modified_base 278..280: mod_base = OTHER; note = uracil
  modified_base 282: mod_base = OTHER; note = uracil
  modified_base 294: mod_base = OTHER; note = uracil
  modified_base 105: mod_base = m5c
  modified_base 221: mod_base = m5c
  modified_base 268: mod_base = m5c
  variation 150: note = CpG site, residue is C if methylated or T(=U) if unmethylated
ttgttttttttgatttttttttttgggtaggagttagaatgtaaaatatagattttatttgtataaagtatataagagatgtttgggatttggtgatgttgtatcggagattttaatttgttttttaaagtgatttttagggagtgtgaygattttaatttttttggaagtgatttgttaaattatgagttatgttgagtttagtataagtaatatgaggcgaggtaaggtaagtgggtgagtaaggaggaagtagtttagatgagtcggtagagtgtttattgggagtgaggtatgatg

SEQ ID NO: 454 - DNA, 300 bp, synthetic construct
  source 1..300: mol_type = other DNA
  modified_base 3: mod_base = OTHER; note = uracil
  modified_base 7..8: mod_base = OTHER; note = uracil
  modified_base 10: mod_base = OTHER; note = uracil
  modified_base 12: mod_base = OTHER; note = uracil
  modified_base 14..16: mod_base = OTHER; note = uracil
  modified_base 23: mod_base = OTHER; note = uracil
  modified_base 25: mod_base = OTHER; note = uracil
  modified_base 27: mod_base = OTHER; note = uracil
  modified_base 30: mod_base = OTHER; note = uracil
  modified_base 34: mod_base = OTHER; note = uracil
  modified_base 36: mod_base = OTHER; note = uracil
  modified_base 39: mod_base = OTHER; note = uracil
  modified_base 44: mod_base = OTHER; note = uracil
  modified_base 47: mod_base = OTHER; note = uracil
  modified_base 50..51: mod_base = OTHER; note = uracil
  modified_base 53..54: mod_base = OTHER; note = uracil
  modified_base 58: mod_base = OTHER; note = uracil
  modified_base 60: mod_base = OTHER; note = uracil
  modified_base 62..64: mod_base = OTHER; note = uracil
  modified_base 66: mod_base = OTHER; note = uracil
  modified_base 70..71: mod_base = OTHER; note = uracil
  modified_base 75..76: mod_base = OTHER; note = uracil
  modified_base 80..81: mod_base = OTHER; note = uracil
  modified_base 83: mod_base = OTHER; note = uracil
  modified_base 90: mod_base = OTHER; note = uracil
  modified_base 96: mod_base = OTHER; note = uracil
  modified_base 101: mod_base = OTHER; note = uracil
  modified_base 103: mod_base = OTHER; note = uracil
  modified_base 106: mod_base = OTHER; note = uracil
  modified_base 111: mod_base = OTHER; note = uracil
  modified_base 113: mod_base = OTHER; note = uracil
  modified_base 123: mod_base = OTHER; note = uracil
  modified_base 128: mod_base = OTHER; note = uracil
  modified_base 130: mod_base = OTHER; note = uracil
  modified_base 133..134: mod_base = OTHER; note = uracil
  modified_base 152: mod_base = OTHER; note = uracil
  modified_base 154: mod_base = OTHER; note = uracil
  modified_base 156: mod_base = OTHER; note = uracil
  modified_base 158..160: mod_base = OTHER; note = uracil
  modified_base 168: mod_base = OTHER; note = uracil
  modified_base 170: mod_base = OTHER; note = uracil
  modified_base 180: mod_base = OTHER; note = uracil
  modified_base 191: mod_base = OTHER; note = uracil
  modified_base 193: mod_base = OTHER; note = uracil
  modified_base 199: mod_base = OTHER; note = uracil
  modified_base 202: mod_base = OTHER; note = uracil
  modified_base 205: mod_base = OTHER; note = uracil
  modified_base 207..208: mod_base = OTHER; note = uracil
  modified_base 213..215: mod_base = OTHER; note = uracil
  modified_base 219: mod_base = OTHER; note = uracil
  modified_base 222: mod_base = OTHER; note = uracil
  modified_base 224: mod_base = OTHER; note = uracil
  modified_base 232: mod_base = OTHER; note = uracil
  modified_base 239: mod_base = OTHER; note = uracil
  modified_base 249: mod_base = OTHER; note = uracil
  modified_base 259: mod_base = OTHER; note = uracil
  modified_base 263: mod_base = OTHER; note = uracil
  modified_base 267: mod_base = OTHER; note = uracil
  modified_base 269..270: mod_base = OTHER; note = uracil
  modified_base 273..275: mod_base = OTHER; note = uracil
  modified_base 288: mod_base = OTHER; note = uracil
  modified_base 297: mod_base = OTHER; note = uracil
  modified_base 300: mod_base = OTHER; note = uracil
  modified_base 31: mod_base = m5c
  modified_base 78: mod_base = m5c
  modified_base 194: mod_base = m5c
  variation 149: note = CpG site, residue is C if methylated or T(=U) if unmethylated
attatgttttatttttagtgggtattttgtcggtttatttgggttgttttttttttatttatttatttgttttgtttcgttttatattatttgtgttgaatttagtatggtttatggtttgataagttatttttaaaagagttgagatygttatattttttaggaattattttgaaaaataggttgaaattttcggtgtagtattattagattttaagtattttttgtgtgttttatatagatagaatttgtattttgtattttaatttttgtttaaagaaaaaaattaaaagaggtaat

SEQ ID NO: 455 - DNA, 300 bp, synthetic construct
  source 1..300: mol_type = other DNA
  modified_base 2: mod_base = OTHER; note = uracil
  modified_base 11: mod_base = OTHER; note = uracil
  modified_base 19: mod_base = OTHER; note = uracil
  modified_base 28: mod_base = OTHER; note = uracil
  modified_base 31: mod_base = OTHER; note = uracil
  modified_base 33: mod_base = OTHER; note = uracil
  modified_base 43: mod_base = OTHER; note = uracil
  modified_base 46..47: mod_base = OTHER; note = uracil
  modified_base 55: mod_base = OTHER; note = uracil
  modified_base 65..66: mod_base = OTHER; note = uracil
  modified_base 83: mod_base = OTHER; note = uracil
  modified_base 85: mod_base = OTHER; note = uracil
  modified_base 88: mod_base = OTHER; note = uracil
  modified_base 90: mod_base = OTHER; note = uracil
  modified_base 103: mod_base = OTHER; note = uracil
  modified_base 108: mod_base = OTHER; note = uracil
  modified_base 112..113: mod_base = OTHER; note = uracil
  modified_base 119..120: mod_base = OTHER; note = uracil
  modified_base 124: mod_base = OTHER; note = uracil
  modified_base 131: mod_base = OTHER; note = uracil
  modified_base 134: mod_base = OTHER; note = uracil
  modified_base 136: mod_base = OTHER; note = uracil
  modified_base 155: mod_base = OTHER; note = uracil
  modified_base 160: mod_base = OTHER; note = uracil
  modified_base 183: mod_base = OTHER; note = uracil
  modified_base 186..188: mod_base = OTHER; note = uracil
  modified_base 196: mod_base = OTHER; note = uracil
  modified_base 200: mod_base = OTHER; note = uracil
  modified_base 207..209: mod_base = OTHER; note = uracil
  modified_base 211: mod_base = OTHER; note = uracil
  modified_base 223: mod_base = OTHER; note = uracil
  modified_base 237: mod_base = OTHER; note = uracil
  modified_base 251: mod_base = OTHER; note = uracil
  modified_base 259: mod_base = OTHER; note = uracil
  modified_base 261: mod_base = OTHER; note = uracil
  modified_base 263: mod_base = OTHER; note = uracil
  modified_base 265: mod_base = OTHER; note = uracil
  modified_base 269: mod_base = OTHER; note = uracil
  modified_base 276..277: mod_base = OTHER; note = uracil
  modified_base 281: mod_base = OTHER; note = uracil
  modified_base 284: mod_base = OTHER; note = uracil
  modified_base 286..287: mod_base = OTHER; note = uracil
  modified_base 298: mod_base = OTHER; note = uracil
  modified_base 300: mod_base = OTHER; note = uracil
  modified_base 34: mod_base = m5c
  modified_base 79: mod_base = m5c
  modified_base 197: mod_base = m5c
  modified_base 239: mod_base = m5c
  modified_base 242: mod_base = m5c
  variation 150: note = CpG site, residue is C if methylated or T(=U) if unmethylated
ataagagatgtttgggatttggtgatgttgtatcggagattttaatttgttttttaaagtgatttttagggagtgtgacgattttaatttttttggaagtgatttgttaaattatgagttatgttgagtttagtataagtaatatgaggygaggtaaggtaagtgggtgagtaaggaggaagtagtttagatgagtcggtagagtgtttattgggagtgaggtatgatgaggattattcgtcgtgggaggtatgagggtattttttggtaaggttttttgtattattaaaatgaggttat

SEQ ID NO: 456 - DNA, 300 bp, synthetic construct
  source 1..300: mol_type = other DNA
  modified_base 4..5: mod_base = OTHER; note = uracil
  modified_base 7: mod_base = OTHER; note = uracil
  modified_base 20: mod_base = OTHER; note = uracil
  modified_base 27..28: mod_base = OTHER; note = uracil
  modified_base 32..33: mod_base = OTHER; note = uracil
  modified_base 42..44: mod_base = OTHER; note = uracil
  modified_base 46: mod_base = OTHER; note = uracil
  modified_base 50..51: mod_base = OTHER; note = uracil
  modified_base 53..55: mod_base = OTHER; note = uracil
  modified_base 68..69: mod_base = OTHER; note = uracil
  modified_base 71: mod_base = OTHER; note = uracil
  modified_base 74: mod_base = OTHER; note = uracil
  modified_base 78..79: mod_base = OTHER; note = uracil
  modified_base 81: mod_base = OTHER; note = uracil
  modified_base 83: mod_base = OTHER; note = uracil
  modified_base 85..87: mod_base = OTHER; note = uracil
  modified_base 94: mod_base = OTHER; note = uracil
  modified_base 96: mod_base = OTHER; note = uracil
  modified_base 98: mod_base = OTHER; note = uracil
  modified_base 101: mod_base = OTHER; note = uracil
  modified_base 105: mod_base = OTHER; note = uracil
  modified_base 107: mod_base = OTHER; note = uracil
  modified_base 110: mod_base = OTHER; note = uracil
  modified_base 115: mod_base = OTHER; note = uracil
  modified_base 118: mod_base = OTHER; note = uracil
  modified_base 121..122: mod_base = OTHER; note = uracil
  modified_base 124..125: mod_base = OTHER; note = uracil
  modified_base 129: mod_base = OTHER; note = uracil
  modified_base 131: mod_base = OTHER; note = uracil
  modified_base 133..135: mod_base = OTHER; note = uracil
  modified_base 137: mod_base = OTHER; note = uracil
  modified_base 141..142: mod_base = OTHER; note = uracil
  modified_base 146..147: mod_base = OTHER; note = uracil
  modified_base 151..152: mod_base = OTHER; note = uracil
  modified_base 154: mod_base = OTHER; note = uracil
  modified_base 161: mod_base = OTHER; note = uracil
  modified_base 167: mod_base = OTHER; note = uracil
  modified_base 172: mod_base = OTHER; note = uracil
  modified_base 174: mod_base = OTHER; note = uracil
  modified_base 177: mod_base = OTHER; note = uracil
  modified_base 182: mod_base = OTHER; note = uracil
  modified_base 184: mod_base = OTHER; note = uracil
  modified_base 194: mod_base = OTHER; note = uracil
  modified_base 199: mod_base = OTHER; note = uracil
  modified_base 201: mod_base = OTHER; note = uracil
  modified_base 204..205: mod_base = OTHER; note = uracil
  modified_base 223: mod_base = OTHER; note = uracil
  modified_base 225: mod_base = OTHER; note = uracil
  modified_base 227: mod_base = OTHER; note = uracil
  modified_base 229..231: mod_base = OTHER; note = uracil
  modified_base 239: mod_base = OTHER; note = uracil
  modified_base 241: mod_base = OTHER; note = uracil
  modified_base 251: mod_base = OTHER; note = uracil
  modified_base 262: mod_base = OTHER; note = uracil
  modified_base 264: mod_base = OTHER; note = uracil
  modified_base 270: mod_base = OTHER; note = uracil
  modified_base 273: mod_base = OTHER; note = uracil
  modified_base 276: mod_base = OTHER; note = uracil
  modified_base 278..279: mod_base = OTHER; note = uracil
  modified_base 284..286: mod_base = OTHER; note = uracil
  modified_base 290: mod_base = OTHER; note = uracil
  modified_base 293: mod_base = OTHER; note = uracil
  modified_base 295: mod_base = OTHER; note = uracil
  modified_base 57: mod_base = m5c
  modified_base 60: mod_base = m5c
  modified_base 102: mod_base = m5c
  modified_base 220: mod_base = m5c
  modified_base 265: mod_base = m5c
  variation 149: note = CpG site, residue is C if methylated or T(=U) if unmethylated
tgattttattttggtgatgtaaggaattttgttagagagtgtttttatgttttttacgacgagtaatttttattatgttttatttttagtgggtattttgtcggtttatttgggttgttttttttttatttatttatttgttttgtttygttttatattatttgtgttgaatttagtatggtttatggtttgataagttatttttaaaagagttgagatcgttatattttttaggaattattttgaaaaataggttgaaattttcggtgtagtattattagattttaagtattttttgtg

SEQ ID NO: 457 - DNA, 300 bp, synthetic construct
  source 1..300: mol_type = other DNA
  modified_base 3: mod_base = OTHER; note = uracil
  modified_base 7: mod_base = OTHER; note = uracil
  modified_base 20..21: mod_base = OTHER; note = uracil
  modified_base 24: mod_base = OTHER; note = uracil
  modified_base 28..29: mod_base = OTHER; note = uracil
  modified_base 36: mod_base = OTHER; note = uracil
  modified_base 44: mod_base = OTHER; note = uracil
  modified_base 65..66: mod_base = OTHER; note = uracil
  modified_base 72: mod_base = OTHER; note = uracil
  modified_base 83: mod_base = OTHER; note = uracil
  modified_base 91: mod_base = OTHER; note = uracil
  modified_base 93: mod_base = OTHER; note = uracil
  modified_base 101..102: mod_base = OTHER; note = uracil
  modified_base 106: mod_base = OTHER; note = uracil
  modified_base 113: mod_base = OTHER; note = uracil
  modified_base 126: mod_base = OTHER; note = uracil
  modified_base 130: mod_base = OTHER; note = uracil
  modified_base 135: mod_base = OTHER; note = uracil
  modified_base 138: mod_base = OTHER; note = uracil
  modified_base 148: mod_base = OTHER; note = uracil
  modified_base 150: mod_base = OTHER; note = uracil
  modified_base 153: mod_base = OTHER; note = uracil
  modified_base 157..158: mod_base = OTHER; note = uracil
  modified_base 168: mod_base = OTHER; note = uracil
  modified_base 179..181: mod_base = OTHER; note = uracil
  modified_base 186: mod_base = OTHER; note = uracil
  modified_base 190: mod_base = OTHER; note = uracil
  modified_base 193: mod_base = OTHER; note = uracil
  modified_base 196: mod_base = OTHER; note = uracil
  modified_base 202: mod_base = OTHER; note = uracil
  modified_base 205: mod_base = OTHER; note = uracil
  modified_base 212: mod_base = OTHER; note = uracil
  modified_base 225: mod_base = OTHER; note = uracil
  modified_base 231: mod_base = OTHER; note = uracil
  modified_base 235: mod_base = OTHER; note = uracil
  modified_base 238..239: mod_base = OTHER; note = uracil
  modified_base 241..244: mod_base = OTHER; note = uracil
  modified_base 246: mod_base = OTHER; note = uracil
  modified_base 249..254: mod_base = OTHER; note = uracil
  modified_base 258..259: mod_base = OTHER; note = uracil
  modified_base 267..268: mod_base = OTHER; note = uracil
  modified_base 276: mod_base = OTHER; note = uracil
  modified_base 287..289: mod_base = OTHER; note = uracil
  modified_base 295..296: mod_base = OTHER; note = uracil
  modified_base 37: mod_base = m5c
  modified_base 206: mod_base = m5c
  modified_base 233: mod_base = m5c
  modified_base 236: mod_base = m5c
  modified_base 299: mod_base = m5c
  variation 151: note = CpG site, residue is C if methylated or T(=U) if unmethylated
agtaaatagagggtatggtttaatttgtttatgaatcgggaagtataatattttaatatttgtgttttaagtagttgttttatttaaaagtataggaaattttgtttttttttttgttataaaattttataaagttattggaaagattttygtaggttagtggtttttaaagtgggtttttagaattagtaatagttgaattattcgggaattggttagaaatgtaaagtttcgtcgttattttttaattttttagatttaatgaattagaaattttggggtgtggtttagtggtttgcg

SEQ ID NO: 458 - DNA, 300 bp, synthetic construct
  source 1..300: mol_type = other DNA
  modified_base 3: mod_base = OTHER; note = uracil
  modified_base 7..8: mod_base = OTHER; note = uracil
  modified_base 10: mod_base = OTHER; note = uracil
  modified_base 15..16: mod_base = OTHER; note = uracil
  modified_base 18: mod_base = OTHER; note = uracil
  modified_base 20..23: mod_base = OTHER; note = uracil
  modified_base 31: mod_base = OTHER; note = uracil
  modified_base 37: mod_base = OTHER; note = uracil
  modified_base 45: mod_base = OTHER; note = uracil
  modified_base 72: mod_base = OTHER; note = uracil
  modified_base 77: mod_base = OTHER; note = uracil
  modified_base 82: mod_base = OTHER; note = uracil
  modified_base 86..87: mod_base = OTHER; note = uracil
  modified_base 92..93: mod_base = OTHER; note = uracil
  modified_base 103: mod_base = OTHER; note = uracil
  modified_base 106: mod_base = OTHER; note = uracil
  modified_base 112: mod_base = OTHER; note = uracil
  modified_base 118: mod_base = OTHER; note = uracil
  modified_base 125..127: mod_base = OTHER; note = uracil
  modified_base 129: mod_base = OTHER; note = uracil
  modified_base 138..139: mod_base = OTHER; note = uracil
  modified_base 141: mod_base = OTHER; note = uracil
  modified_base 145..146: mod_base = OTHER; note = uracil
  modified_base 156: mod_base = OTHER; note = uracil
  modified_base 160..161: mod_base = OTHER; note = uracil
  modified_base 167: mod_base = OTHER; note = uracil
  modified_base 185: mod_base = OTHER; note = uracil
  modified_base 197: mod_base = OTHER; note = uracil
  modified_base 205..206: mod_base = OTHER; note = uracil
  modified_base 211: mod_base = OTHER; note = uracil
  modified_base 224: mod_base = OTHER; note = uracil
  modified_base 227: mod_base = OTHER; note = uracil
  modified_base 230: mod_base = OTHER; note = uracil
  modified_base 237: mod_base = OTHER; note = uracil
  modified_base 239: mod_base = OTHER; note = uracil
  modified_base 258: mod_base = OTHER; note = uracil
  modified_base 261..262: mod_base = OTHER; note = uracil
  modified_base 268: mod_base = OTHER; note = uracil
  modified_base 274: mod_base = OTHER; note = uracil
  modified_base 283..284: mod_base = OTHER; note = uracil
  modified_base 288..290: mod_base = OTHER; note = uracil
  modified_base 292: mod_base = OTHER; note = uracil
  modified_base 299: mod_base = OTHER; note = uracil
  modified_base 1: mod_base = m5c
  modified_base 64: mod_base = m5c
  modified_base 67: mod_base = m5c
  modified_base 94: mod_base = m5c
  modified_base 263: mod_base = m5c
  variation 149: note = CpG site, residue is C if methylated or T(=U) if unmethylated
cgtaggttattgggttatattttagaatttttggtttattaggtttggggggttgaggggtggcggcgagattttgtatttttaattagttttcggatgatttagttgttgttagttttgggaatttattttgaaaattattggtttgyggagatttttttagtagttttgtaagattttataataagaaaaaagataggattttttgtgtttttaagtaaaataattgtttaaggtataaatattaaaatattatgtttttcggtttataggtaagttggattatattttttgtttgtt

SEQ ID NO: 459 - DNA, 300 bp, synthetic construct
  source 1..300: mol_type = other DNA
  modified_base 2..4: mod_base = OTHER; note = uracil
  modified_base 7..9: mod_base = OTHER; note = uracil
  modified_base 12: mod_base = OTHER; note = uracil
  modified_base 14: mod_base = OTHER; note = uracil
  modified_base 16..18: mod_base = OTHER; note = uracil
  modified_base 22: mod_base = OTHER; note = uracil
  modified_base 24..27: mod_base = OTHER; note = uracil
  modified_base 32..33: mod_base = OTHER; note = uracil
  modified_base 37..38: mod_base = OTHER; note = uracil
  modified_base 43..44: mod_base = OTHER; note = uracil
  modified_base 47..48: mod_base = OTHER; note = uracil
  modified_base 56: mod_base = OTHER; note = uracil
  modified_base 72..74: mod_base = OTHER; note = uracil
  modified_base 88..89: mod_base = OTHER; note = uracil
  modified_base 92: mod_base = OTHER; note = uracil
  modified_base 107: mod_base = OTHER; note = uracil
  modified_base 120: mod_base = OTHER; note = uracil
  modified_base 126: mod_base = OTHER; note = uracil
  modified_base 131: mod_base = OTHER; note = uracil
  modified_base 133: mod_base = OTHER; note = uracil
  modified_base 135: mod_base = OTHER; note = uracil
  modified_base 139: mod_base = OTHER; note = uracil
  modified_base 147: mod_base = OTHER; note = uracil
  modified_base 150: mod_base = OTHER; note = uracil
  modified_base 156: mod_base = OTHER; note = uracil
  modified_base 158: mod_base = OTHER; note = uracil
  modified_base 176: mod_base = OTHER; note = uracil
  modified_base 178: mod_base = OTHER; note = uracil
  modified_base 181..182: mod_base = OTHER; note = uracil
  modified_base 184..185: mod_base = OTHER; note = uracil
  modified_base 190: mod_base = OTHER; note = uracil
  modified_base 192: mod_base = OTHER; note = uracil
  modified_base 200..201: mod_base = OTHER; note = uracil
  modified_base 204..205: mod_base = OTHER; note = uracil
  modified_base 207: mod_base = OTHER; note = uracil
  modified_base 229: mod_base = OTHER; note = uracil
  modified_base 240: mod_base = OTHER; note = uracil
  modified_base 247: mod_base = OTHER; note = uracil
  modified_base 249: mod_base = OTHER; note = uracil
  modified_base 251..252: mod_base = OTHER; note = uracil
  modified_base 260: mod_base = OTHER; note = uracil
  modified_base 268: mod_base = OTHER; note = uracil
  modified_base 273..275: mod_base = OTHER; note = uracil
  modified_base 279: mod_base = OTHER; note = uracil
  modified_base 281: mod_base = OTHER; note = uracil
  modified_base 283: mod_base = OTHER; note = uracil
  modified_base 289: mod_base = OTHER; note = uracil
  modified_base 291..294: mod_base = OTHER; note = uracil
  modified_base 300: mod_base = OTHER; note = uracil
  modified_base 10: mod_base = m5c
  modified_base 19: mod_base = m5c
  modified_base 28: mod_base = m5c
  modified_base 34: mod_base = m5c
  modified_base 41: mod_base = m5c
  modified_base 51: mod_base = m5c
  modified_base 57: mod_base = m5c
  modified_base 64: mod_base = m5c
  modified_base 70: mod_base = m5c
  modified_base 90: mod_base = m5c
  modified_base 93: mod_base = m5c
  modified_base 98: mod_base = m5c
  modified_base 105: mod_base = m5c
  modified_base 118: mod_base = m5c
  modified_base 121: mod_base = m5c
  modified_base 140: mod_base = m5c
  modified_base 163: mod_base = m5c
  modified_base 186: mod_base = m5c
  modified_base 284: mod_base = m5c
  variation 151: note = CpG site, residue is C if methylated or T(=U) if unmethylated
gttttatttcgtttttttcgattttttcgggttcggtttgcgtttttttgcggtgtcgaggagcggtggcgttttgggtgaagaagtttcgtcgagtcgaggggcgtaatggaggagcgtcggaataggttttttatttcgagtagttatygttgtattgtgcgagtgtaaaagttatttttattcggttttagttgttttaattttagttgaagtgaggaggttggattggaaggtttttggggttattttagtgaggttggggttttagttttaattttatcgtggtattttaaaggt

SEQ ID NO: 460 - DNA, 300 bp, synthetic construct
  source 1..300: mol_type = other DNA
  modified_base 2..3: mod_base = OTHER; note = uracil
  modified_base 13..14: mod_base = OTHER; note = uracil
  modified_base 30: mod_base = OTHER; note = uracil
  modified_base 36..39: mod_base = OTHER; note = uracil
  modified_base 42..43: mod_base = OTHER; note = uracil
  modified_base 45: mod_base = OTHER; note = uracil
  modified_base 47: mod_base = OTHER; note = uracil
  modified_base 56..59: mod_base = OTHER; note = uracil
  modified_base 65..66: mod_base = OTHER; note = uracil
  modified_base 69..70: mod_base = OTHER; note = uracil
  modified_base 74..75: mod_base = OTHER; note = uracil
  modified_base 78..79: mod_base = OTHER; note = uracil
  modified_base 81..82: mod_base = OTHER; note = uracil
  modified_base 84: mod_base = OTHER; note = uracil
  modified_base 86: mod_base = OTHER; note = uracil
  modified_base 89: mod_base = OTHER; note = uracil
  modified_base 92: mod_base = OTHER; note = uracil
  modified_base 104: mod_base = OTHER; note = uracil
  modified_base 107: mod_base = OTHER; note = uracil
  modified_base 113: mod_base = OTHER; note = uracil
  modified_base 127: mod_base = OTHER; note = uracil
  modified_base 133: mod_base = OTHER; note = uracil
  modified_base 135: mod_base = OTHER; note = uracil
  modified_base 139: mod_base = OTHER; note = uracil
  modified_base 141: mod_base = OTHER; note = uracil
  modified_base 146: mod_base = OTHER; note = uracil
  modified_base 155: mod_base = OTHER; note = uracil
  modified_base 158: mod_base = OTHER; note = uracil
  modified_base 172..173: mod_base = OTHER; note = uracil
  modified_base 178: mod_base = OTHER; note = uracil
  modified_base 184: mod_base = OTHER; note = uracil
  modified_base 186..187: mod_base = OTHER; note = uracil
  modified_base 189..190: mod_base = OTHER; note = uracil
  modified_base 197..200: mod_base = OTHER; note = uracil
  modified_base 205: mod_base = OTHER; note = uracil
  modified_base 215: mod_base = OTHER; note = uracil
  modified_base 218: mod_base = OTHER; note = uracil
  modified_base 221: mod_base = OTHER; note = uracil
  modified_base 223..225: mod_base = OTHER; note = uracil
  modified_base 232..233: mod_base = OTHER; note = uracil
  modified_base 235: mod_base = OTHER; note = uracil
  modified_base 238: mod_base = OTHER; note = uracil
  modified_base 240..241: mod_base = OTHER; note = uracil
  modified_base 246: mod_base = OTHER; note = uracil
  modified_base 248: mod_base = OTHER; note = uracil
  modified_base 251: mod_base = OTHER; note = uracil
  modified_base 261: mod_base = OTHER; note = uracil
  modified_base 265: mod_base = OTHER; note = uracil
  modified_base 270..271: mod_base = OTHER; note = uracil
  modified_base 300: mod_base = OTHER; note = uracil
  modified_base 16: mod_base = m5c
  modified_base 114: mod_base = m5c
  modified_base 137: mod_base = m5c
  modified_base 160: mod_base = m5c
  modified_base 179: mod_base = m5c
  modified_base 182: mod_base = m5c
  modified_base 195: mod_base = m5c
  modified_base 202: mod_base = m5c
  modified_base 207: mod_base = m5c
  modified_base 210: mod_base = m5c
  modified_base 230: mod_base = m5c
  modified_base 236: mod_base = m5c
  modified_base 243: mod_base = m5c
  modified_base 249: mod_base = m5c
  modified_base 259: mod_base = m5c
  modified_base 266: mod_base = m5c
  modified_base 272: mod_base = m5c
  modified_base 281: mod_base = m5c
  modified_base 290: mod_base = m5c
  variation 149: note = CpG site, residue is C if methylated or T(=U) if unmethylated
gtttttggggtgttacggtgagattgggattagaattttagttttattggagtgattttagaaattttttagtttaatttttttattttaattgaggttggaataattgagatcgggtggaagtgatttttatattcgtatagtgtaayggtagttattcggaatgagagatttgtttcggcgtttttttattgcgtttttcgattcggcgggatttttttatttagggcgttatcgtttttcggtatcgtaggaaggcgtaggtcgggttcgggggagtcggggagagcggggtagggt

SEQ ID NO: 461 - DNA, 300 bp, synthetic construct
  source 1..300: mol_type = other DNA
  modified_base 4: mod_base = OTHER; note = uracil
  modified_base 6: mod_base = OTHER; note = uracil
  modified_base 10: mod_base = OTHER; note = uracil
  modified_base 12: mod_base = OTHER; note = uracil
  modified_base 17: mod_base = OTHER; note = uracil
  modified_base 20: mod_base = OTHER; note = uracil
  modified_base 29: mod_base = OTHER; note = uracil
  modified_base 31: mod_base = OTHER; note = uracil
  modified_base 38: mod_base = OTHER; note = uracil
  modified_base 40..41: mod_base = OTHER; note = uracil
  modified_base 43..44: mod_base = OTHER; note = uracil
  modified_base 52..55: mod_base = OTHER; note = uracil
  modified_base 58..59: mod_base = OTHER; note = uracil
  modified_base 61: mod_base = OTHER; note = uracil
  modified_base 63..64: mod_base = OTHER; note = uracil
  modified_base 70: mod_base = OTHER; note = uracil
  modified_base 73: mod_base = OTHER; note = uracil
  modified_base 85..86: mod_base = OTHER; note = uracil
  modified_base 88: mod_base = OTHER; note = uracil
  modified_base 93..95: mod_base = OTHER; note = uracil
  modified_base 97..99: mod_base = OTHER; note = uracil
  modified_base 108: mod_base = OTHER; note = uracil
  modified_base 117..118: mod_base = OTHER; note = uracil
  modified_base 122: mod_base = OTHER; note = uracil
  modified_base 126: mod_base = OTHER; note = uracil
  modified_base 130..131: mod_base = OTHER; note = uracil
  modified_base 133..134: mod_base = OTHER; note = uracil
  modified_base 138..142: mod_base = OTHER; note = uracil
  modified_base 144: mod_base = OTHER; note = uracil
  modified_base 161: mod_base = OTHER; note = uracil
  modified_base 164: mod_base = OTHER; note = uracil
  modified_base 168: mod_base = OTHER; note = uracil
  modified_base 175: mod_base = OTHER; note = uracil
  modified_base 179..182: mod_base = OTHER; note = uracil
  modified_base 184: mod_base = OTHER; note = uracil
  modified_base 187: mod_base = OTHER; note = uracil
  modified_base 189: mod_base = OTHER; note = uracil
  modified_base 195: mod_base = OTHER; note = uracil
  modified_base 198..199: mod_base = OTHER; note = uracil
  modified_base 204: mod_base = OTHER; note = uracil
  modified_base 207: mod_base = OTHER; note = uracil
  modified_base 209: mod_base = OTHER; note = uracil
  modified_base 216..218: mod_base = OTHER; note = uracil
  modified_base 223..224: mod_base = OTHER; note = uracil
  modified_base 229..230: mod_base = OTHER; note = uracil
  modified_base 240: mod_base = OTHER; note = uracil
  modified_base 250: mod_base = OTHER; note = uracil
  modified_base 254: mod_base = OTHER; note = uracil
  modified_base 266..267: mod_base = OTHER; note = uracil
  modified_base 276: mod_base = OTHER; note = uracil
  modified_base 280: mod_base = OTHER; note = uracil
  modified_base 285: mod_base = OTHER; note = uracil
  modified_base 47: mod_base = m5c
  modified_base 66: mod_base = m5c
  modified_base 79: mod_base = m5c
  modified_base 119: mod_base = m5c
  modified_base 268: mod_base = m5c
  variation 150: note = CpG site, residue is C if methylated or T(=U) if unmethylated
ggatataatttttgttttttaaagttggtattaagagttttttttgcggttttttttttttttttcgagtagtaaaggcgtggtttataatgtttattttgtggggtttaggggtgttcggtttgttgatttttaggttttttttgtggygaggtttggattgtatatatggtgtaggttttttattattggagttgttaggatagtattggagattttaagttaatatttatttttggtaataattattaagtatttgtaaaagttcgggtatgttggtaaatttttttaaaataagag

SEQ ID NO: 462 - DNA, 300 bp, synthetic construct
  source 1..300: mol_type = other DNA
  modified_base 1: mod_base = OTHER; note = uracil
  modified_base 3: mod_base = OTHER; note = uracil
  modified_base 22..23: mod_base = OTHER; note = uracil
  modified_base 26: mod_base = OTHER; note = uracil
  modified_base 30..31: mod_base = OTHER; note = uracil
  modified_base 36: mod_base = OTHER; note = uracil
  modified_base 42: mod_base = OTHER; note = uracil
  modified_base 48: mod_base = OTHER; note = uracil
  modified_base 62..63: mod_base = OTHER; note = uracil
  modified_base 79: mod_base = OTHER; note = uracil
  modified_base 87: mod_base = OTHER; note = uracil
  modified_base 89..90: mod_base = OTHER; note = uracil
  modified_base 95: mod_base = OTHER; note = uracil
  modified_base 99..100: mod_base = OTHER; note = uracil
  modified_base 104: mod_base = OTHER; note = uracil
  modified_base 107: mod_base = OTHER; note = uracil
  modified_base 109..110: mod_base = OTHER; note = uracil
  modified_base 123..124: mod_base = OTHER; note = uracil
  modified_base 127: mod_base = OTHER; note = uracil
  modified_base 129..130: mod_base = OTHER; note = uracil
  modified_base 138: mod_base = OTHER; note = uracil
  modified_base 142..143: mod_base = OTHER; note = uracil
  modified_base 147..148: mod_base = OTHER; note = uracil
  modified_base 152..153: mod_base = OTHER; note = uracil
  modified_base 155: mod_base = OTHER; note = uracil
  modified_base 164..165: mod_base = OTHER; note = uracil
  modified_base 173: mod_base = OTHER; note = uracil
  modified_base 176: mod_base = OTHER; note = uracil
  modified_base 180: mod_base = OTHER; note = uracil
  modified_base 185: mod_base = OTHER; note = uracil
  modified_base 187..190: mod_base = OTHER; note = uracil
  modified_base 195..198: mod_base = OTHER; note = uracil
  modified_base 200: mod_base = OTHER; note = uracil
  modified_base 209: mod_base = OTHER; note = uracil
  modified_base 218..219: mod_base = OTHER; note = uracil
  modified_base 223..224: mod_base = OTHER; note = uracil
  modified_base 229: mod_base = OTHER; note = uracil
  modified_base 232: mod_base = OTHER; note = uracil
  modified_base 252: mod_base = OTHER; note = uracil
  modified_base 255: mod_base = OTHER; note = uracil
  modified_base 264: mod_base = OTHER; note = uracil
  modified_base 266: mod_base = OTHER; note = uracil
  modified_base 273..274: mod_base = OTHER; note = uracil
  modified_base 277: mod_base = OTHER; note = uracil
  modified_base 287: mod_base = OTHER; note = uracil
  modified_base 299..300: mod_base = OTHER; note = uracil
  modified_base 32: mod_base = m5c
  modified_base 181: mod_base = m5c
  modified_base 221: mod_base = m5c
  modified_base 234: mod_base = m5c
  modified_base 253: mod_base = m5c
  variation 150: note = CpG site, residue is C if methylated or T(=U) if unmethylated
tttttattttaaaaagatttgttagtatattcgggtttttataaatgtttgataattattgttaaaaataggtattggtttagggtttttagtgttgttttggtagttttagtgatgaggggtttgtattatgtatgtagtttaaatttygttatagagggggtttggaggttagtaagtcgggtatttttagattttatagggtgggtattgtggattacgtttttgttgttcgaggagaggaaggggaatcgtaggaggagtttttagtgttaattttgaagaatagagattgtgttt

SEQ ID NO: 463 - DNA, 300 bp, synthetic construct
  source 1..300: mol_type = other DNA
  modified_base 2: mod_base = OTHER; note = uracil
  modified_base 10: mod_base = OTHER; note = uracil
  modified_base 13: mod_base = OTHER; note = uracil
  modified_base 15..16: mod_base = OTHER; note = uracil
  modified_base 18..21: mod_base = OTHER; note = uracil
  modified_base 24: mod_base = OTHER; note = uracil
  modified_base 28..29: mod_base = OTHER; note = uracil
  modified_base 32: mod_base = OTHER; note = uracil
  modified_base 35..36: mod_base = OTHER; note = uracil
  modified_base 39: mod_base = OTHER; note = uracil
  modified_base 45: mod_base = OTHER; note = uracil
  modified_base 49..51: mod_base = OTHER; note = uracil
  modified_base 58: mod_base = OTHER; note = uracil
  modified_base 61..63: mod_base = OTHER; note = uracil
  modified_base 67: mod_base = OTHER; note = uracil
  modified_base 70: mod_base = OTHER; note = uracil
  modified_base 76..77: mod_base = OTHER; note = uracil
  modified_base 83..84: mod_base = OTHER; note = uracil
  modified_base 86: mod_base = OTHER; note = uracil
  modified_base 90: mod_base = OTHER; note = uracil
  modified_base 92: mod_base = OTHER; note = uracil
  modified_base 108: mod_base = OTHER; note = uracil
  modified_base 110: mod_base = OTHER; note = uracil
  modified_base 117: mod_base = OTHER; note = uracil
  modified_base 119..120: mod_base = OTHER; note = uracil
  modified_base 122..124: mod_base = OTHER; note = uracil
  modified_base 129: mod_base = OTHER; note = uracil
  modified_base 139: mod_base = OTHER; note = uracil
  modified_base 146..147: mod_base = OTHER; note = uracil
  modified_base 154: mod_base = OTHER; note = uracil
  modified_base 156: mod_base = OTHER; note = uracil
  modified_base 159..160: mod_base = OTHER; note = uracil
  modified_base 164..168: mod_base = OTHER; note = uracil
  modified_base 171: mod_base = OTHER; note = uracil
  modified_base 173..174: mod_base = OTHER; note = uracil
  modified_base 183..184: mod_base = OTHER; note = uracil
  modified_base 188: mod_base = OTHER; note = uracil
  modified_base 195: mod_base = OTHER; note = uracil
  modified_base 202..203: mod_base = OTHER; note = uracil
  modified_base 208..209: mod_base = OTHER; note = uracil
  modified_base 213: mod_base = OTHER; note = uracil
  modified_base 218: mod_base = OTHER; note = uracil
  modified_base 227: mod_base = OTHER; note = uracil
  modified_base 229: mod_base = OTHER; note = uracil
  modified_base 240..241: mod_base = OTHER; note = uracil
  modified_base 244: mod_base = OTHER; note = uracil
  modified_base 247: mod_base = OTHER; note = uracil
  modified_base 251..252: mod_base = OTHER; note = uracil
  modified_base 258: mod_base = OTHER; note = uracil
  modified_base 268: mod_base = OTHER; note = uracil
  modified_base 274..275: mod_base = OTHER; note = uracil
  modified_base 281: mod_base = OTHER; note = uracil
  modified_base 8: mod_base = m5c
  modified_base 30: mod_base = m5c
  modified_base 65: mod_base = m5c
  modified_base 93: mod_base = m5c
  modified_base 126: mod_base = m5c
  modified_base 140: mod_base = m5c
  modified_base 189: mod_base = m5c
  modified_base 276: mod_base = m5c
  variation 150: note = CpG site, residue is C if methylated or T(=U) if unmethylated
atttgagcgtttttttattttagtaggttcgttgttattaagggtttattttgtgggttgtttacgttgttgtaattagtgattataagtttcgtggtgttgagaagtatatgtttttttttttacggttgtgtaggttcggagttttaygggtttagttagtttttttgttttaggtttaattaggtcggaattaagatgttagggtttggttgtgttttggaggtttttggtgagaatttgtttttggtttggtgtagggtgtggtagaatttcgatgtttgagtttgaatggtgaaa

SEQ ID NO: 464 - DNA, 300 bp, synthetic construct
  source 1..300: mol_type = other DNA
  modified_base 4: mod_base = OTHER; note = uracil
  modified_base 6..7: mod_base = OTHER; note = uracil
  modified_base 11: mod_base = OTHER; note = uracil
  modified_base 15: mod_base = OTHER; note = uracil
  modified_base 17: mod_base = OTHER; note = uracil
  modified_base 21: mod_base = OTHER; note = uracil
  modified_base 31: mod_base = OTHER; note = uracil
  modified_base 34..35: mod_base = OTHER; note = uracil
  modified_base 37: mod_base = OTHER; note = uracil
  modified_base 39..41: mod_base = OTHER; note = uracil
  modified_base 44: mod_base = OTHER; note = uracil
  modified_base 46..47: mod_base = OTHER; note = uracil
  modified_base 51..52: mod_base = OTHER; note = uracil
  modified_base 58: mod_base = OTHER; note = uracil
  modified_base 64: mod_base = OTHER; note = uracil
  modified_base 66: mod_base = OTHER; note = uracil
  modified_base 68..69: mod_base = OTHER; note = uracil
  modified_base 75..76: mod_base = OTHER; note = uracil
  modified_base 78..79: mod_base = OTHER; note = uracil
  modified_base 84: mod_base = OTHER; note = uracil
  modified_base 86: mod_base = OTHER; note = uracil
  modified_base 89..90: mod_base = OTHER; note = uracil
  modified_base 94..96: mod_base = OTHER; note = uracil
  modified_base 100: mod_base = OTHER; note = uracil
  modified_base 103: mod_base = OTHER; note = uracil
  modified_base 110: mod_base = OTHER; note = uracil
  modified_base 114..115: mod_base = OTHER; note = uracil
  modified_base 124..125: mod_base = OTHER; note = uracil
  modified_base 131: mod_base = OTHER; note = uracil
  modified_base 139: mod_base = OTHER; note = uracil
  modified_base 143: mod_base = OTHER; note = uracil
  modified_base 148..149: mod_base = OTHER; note = uracil
  modified_base 157: mod_base = OTHER; note = uracil
  modified_base 159: mod_base = OTHER; note = uracil
  modified_base 164..165: mod_base = OTHER; note = uracil
  modified_base 168: mod_base = OTHER; note = uracil
  modified_base 170: mod_base = OTHER; note = uracil
  modified_base 173: mod_base = OTHER; note = uracil
  modified_base 188: mod_base = OTHER; note = uracil
  modified_base 194: mod_base = OTHER; note = uracil
  modified_base 197: mod_base = OTHER; note = uracil
  modified_base 199: mod_base = OTHER; note = uracil
  modified_base 202: mod_base = OTHER; note = uracil
  modified_base 204..205: mod_base = OTHER; note = uracil
  modified_base 212: mod_base = OTHER; note = uracil
  modified_base 220: mod_base = OTHER; note = uracil
  modified_base 222: mod_base = OTHER; note = uracil
  modified_base 229: mod_base = OTHER; note = uracil
  modified_base 232: mod_base = OTHER; note = uracil
  modified_base 241: mod_base = OTHER; note = uracil
  modified_base 244..246: mod_base = OTHER; note = uracil
  modified_base 248: mod_base = OTHER; note = uracil
  modified_base 257..259: mod_base = OTHER; note = uracil
  modified_base 267: mod_base = OTHER; note = uracil
  modified_base 274..275: mod_base = OTHER; note = uracil
  modified_base 278: mod_base = OTHER; note = uracil
  modified_base 294: mod_base = OTHER; note = uracil
  modified_base 296: mod_base = OTHER; note = uracil
  modified_base 24: mod_base = m5c
  modified_base 111: mod_base = m5c
  modified_base 160: mod_base = m5c
  modified_base 174: mod_base = m5c
  modified_base 207: mod_base = m5c
  modified_base 235: mod_base = m5c
  modified_base 270: mod_base = m5c
  modified_base 292: mod_base = m5c
  variation 150: note = CpG site, residue is C if methylated or T(=U) if unmethylated
ttttattatttaaatttaagtatcgggattttgttatattttgtattaggttagaagtaggtttttattaagagtttttaaagtatagttaggttttggtattttgatttcggtttggttaaatttggagtagggggattggttgagttygtaggatttcggatttatatagtcgtgggaggagaaatatgtgttttttaatattacggagtttgtggttattggttatagtagcgtgggtagtttatagggtaagtttttgatggtagcgggtttgttggggtggagaagcgtttaagt

SEQ ID NO: 465 - DNA, 300 bp, synthetic construct
  source 1..300: mol_type = other DNA
  modified_base 4: mod_base = OTHER; note = uracil
  modified_base 6: mod_base = OTHER; note = uracil
  modified_base 10: mod_base = OTHER; note = uracil
  modified_base 14..16: mod_base = OTHER; note = uracil
  modified_base 28: mod_base = OTHER; note = uracil
  modified_base 36: mod_base = OTHER; note = uracil
  modified_base 39..40: mod_base = OTHER; note = uracil
  modified_base 44: mod_base = OTHER; note = uracil
  modified_base 50..52: mod_base = OTHER; note = uracil
  modified_base 55: mod_base = OTHER; note = uracil
  modified_base 59: mod_base = OTHER; note = uracil
  modified_base 62: mod_base = OTHER; note = uracil
  modified_base 66..67: mod_base = OTHER; note = uracil
  modified_base 79: mod_base = OTHER; note = uracil
  modified_base 89: mod_base = OTHER; note = uracil
  modified_base 91: mod_base = OTHER; note = uracil
  modified_base 93: mod_base = OTHER; note = uracil
  modified_base 96..99: mod_base = OTHER; note = uracil
  modified_base 102..103: mod_base = OTHER; note = uracil
  modified_base 105: mod_base = OTHER; note = uracil
  modified_base 108: mod_base = OTHER; note = uracil
  modified_base 110: mod_base = OTHER; note = uracil
  modified_base 122..123: mod_base = OTHER; note = uracil
  modified_base 132: mod_base = OTHER; note = uracil
  modified_base 134: mod_base = OTHER; note = uracil
  modified_base 139..140: mod_base = OTHER; note = uracil
  modified_base 146: mod_base = OTHER; note = uracil
  modified_base 151: mod_base = OTHER; note = uracil
  modified_base 160: mod_base = OTHER; note = uracil
  modified_base 171: mod_base = OTHER; note = uracil
  modified_base 174: mod_base = OTHER; note = uracil
  modified_base 178: mod_base = OTHER; note = uracil
  modified_base 189: mod_base = OTHER; note = uracil
  modified_base 192..193: mod_base = OTHER; note = uracil
  modified_base 196: mod_base = OTHER; note = uracil
  modified_base 199..201: mod_base = OTHER; note = uracil
  modified_base 208: mod_base = OTHER; note = uracil
  modified_base 211: mod_base = OTHER; note = uracil
  modified_base 219: mod_base = OTHER; note = uracil
  modified_base 225: mod_base = OTHER; note = uracil
  modified_base 227: mod_base = OTHER; note = uracil
  modified_base 231..233: mod_base = OTHER; note = uracil
  modified_base 238..241: mod_base = OTHER; note = uracil
  modified_base 244: mod_base = OTHER; note = uracil
  modified_base 247..249: mod_base = OTHER; note = uracil
  modified_base 256..257: mod_base = OTHER; note = uracil
  modified_base 265: mod_base = OTHER; note = uracil
  modified_base 272: mod_base = OTHER; note = uracil
  modified_base 290: mod_base = OTHER; note = uracil
  modified_base 293..295: mod_base = OTHER; note = uracil
  modified_base 297: mod_base = OTHER; note = uracil
  modified_base 299: mod_base = OTHER; note = uracil
  modified_base 8: mod_base = m5c
  modified_base 56: mod_base = m5c
  modified_base 68: mod_base = m5c
  modified_base 81: mod_base = m5c
  modified_base 161: mod_base = m5c
  modified_base 212: mod_base = m5c
  modified_base 220: mod_base = m5c
  variation 141: note = CpG site, residue is C if methylated or T(=U) if unmethylated
  variation 153: note = CpG site, residue is C if methylated or T(=U) if unmethylated
  variation 158: note = CpG site, residue is C if methylated or T(=U) if unmethylated
aaatttacgttggtttaagaggaggaatagagaagttttttggttgaggtttagtcgattgttgattcggaaaagtttttcgaggtgatttatatttttagtttttgtatatgtgggtgagttagttgtagttttgttttygtgattgagtaygggaygtcggaggtatttattaggtatgaggttatttgtttattttttatgtgttagtcgagtgatcgaattttagttttttagtttttatatttttagggttttagtggattgtaagttggtgataagagttgtgttgtttttatt

SEQ ID NO: 466 - DNA, 300 bp, synthetic construct
  source 1..300: mol_type = other DNA
  modified_base 8: mod_base = OTHER; note = uracil
  modified_base 11: mod_base = OTHER; note = uracil
  modified_base 13: mod_base = OTHER; note = uracil
  modified_base 16: mod_base = OTHER; note = uracil
  modified_base 18: mod_base = OTHER; note = uracil
  modified_base 23: mod_base = OTHER; note = uracil
  modified_base 25..26: mod_base = OTHER; note = uracil
  modified_base 29: mod_base = OTHER; note = uracil
  modified_base 33: mod_base = OTHER; note = uracil
  modified_base 37..38: mod_base = OTHER; note = uracil
  modified_base 40: mod_base = OTHER; note = uracil
  modified_base 46..48: mod_base = OTHER; note = uracil
  modified_base 63: mod_base = OTHER; note = uracil
  modified_base 71: mod_base = OTHER; note = uracil
  modified_base 83: mod_base = OTHER; note = uracil
  modified_base 85: mod_base = OTHER; note = uracil
  modified_base 90: mod_base = OTHER; note = uracil
  modified_base 94: mod_base = OTHER; note = uracil
  modified_base 96: mod_base = OTHER; note = uracil
  modified_base 109: mod_base = OTHER; note = uracil
  modified_base 116..117: mod_base = OTHER; note = uracil
  modified_base 119: mod_base = OTHER; note = uracil
  modified_base 123..124: mod_base = OTHER; note = uracil
  modified_base 134..135: mod_base = OTHER; note = uracil
  modified_base 137: mod_base = OTHER; note = uracil
  modified_base 144..145: mod_base = OTHER; note = uracil
  modified_base 150: mod_base = OTHER; note = uracil
  modified_base 152: mod_base = OTHER; note = uracil
  modified_base 156: mod_base = OTHER; note = uracil
  modified_base 164: mod_base = OTHER; note = uracil
  modified_base 169: mod_base = OTHER; note = uracil
  modified_base 172: mod_base = OTHER; note = uracil
  modified_base 175: mod_base = OTHER; note = uracil
  modified_base 179: mod_base = OTHER; note = uracil
  modified_base 181: mod_base = OTHER; note = uracil
  modified_base 183..185: mod_base = OTHER; note = uracil
  modified_base 187: mod_base = OTHER; note = uracil
  modified_base 193: mod_base = OTHER; note = uracil
  modified_base 199: mod_base = OTHER; note = uracil
  modified_base 213: mod_base = OTHER; note = uracil
  modified_base 215..216: mod_base = OTHER; note = uracil
  modified_base 225: mod_base = OTHER; note = uracil
  modified_base 230: mod_base = OTHER; note = uracil
  modified_base 236: mod_base = OTHER; note = uracil
  modified_base 239: mod_base = OTHER; note = uracil
  modified_base 246: mod_base = OTHER; note = uracil
  modified_base 251..252: mod_base = OTHER; note = uracil
  modified_base 254: mod_base = OTHER; note = uracil
  modified_base 257..258: mod_base = OTHER; note = uracil
  modified_base 265: mod_base = OTHER; note = uracil
  modified_base 268: mod_base = OTHER; note = uracil
  modified_base 270: mod_base = OTHER; note = uracil
  modified_base 275..276: mod_base = OTHER; note = uracil
  modified_base 278..279: mod_base = OTHER; note = uracil
  modified_base 281: mod_base = OTHER; note = uracil
  modified_base 287..288: mod_base = OTHER; note = uracil
  modified_base 79: mod_base = m5c
  modified_base 87: mod_base = m5c
  modified_base 138: mod_base = m5c
  modified_base 218: mod_base = m5c
  modified_base 231: mod_base = m5c
  modified_base 243: mod_base = m5c
  modified_base 291: mod_base = m5c
  variation 141: note = CpG site, residue is C if methylated or T(=U) if unmethylated
  variation 146: note = CpG site, residue is C if methylated or T(=U) if unmethylated
  variation 158: note = CpG site, residue is C if methylated or T(=U) if unmethylated
gtgagggtagtataatttttattattagtttatagtttattaggattttagggatgtaggggttaagggattgagattcggttattcggttgatatatgggaagtaggtagataattttatgtttgatgaatattttcggygtttygtgtttagttaygggaatagagttataattggtttatttatatgtgtagaggttggggatgtgagttatttcgagaaattttttcgggttagtagtcggttgggttttagttaggaagtttttttgtttttttttttgggttagcgtgagtttt

SEQ ID NO: 467 - DNA, 300 bp, synthetic construct; identical to SEQ ID NO: 463
  source 1..300: mol_type = other DNA
  modified_base 2: mod_base = OTHER; note = uracil
  modified_base 10: mod_base = OTHER; note = uracil
  modified_base 13: mod_base = OTHER; note = uracil
  modified_base 15..16: mod_base = OTHER; note = uracil
  modified_base 18..21: mod_base = OTHER; note = uracil
  modified_base 24: mod_base = OTHER; note = uracil
  modified_base 28..29: mod_base = OTHER; note = uracil
  modified_base 32: mod_base = OTHER; note = uracil
  modified_base 35..36: mod_base = OTHER; note = uracil
  modified_base 39: mod_base = OTHER; note = uracil
  modified_base 45: mod_base = OTHER; note = uracil
  modified_base 49..51: mod_base = OTHER; note = uracil
  modified_base 58: mod_base = OTHER; note = uracil
  modified_base 61..63: mod_base = OTHER; note = uracil
  modified_base 67: mod_base = OTHER; note = uracil
  modified_base 70: mod_base = OTHER; note = uracil
  modified_base 76..77: mod_base = OTHER; note = uracil
  modified_base 83..84: mod_base = OTHER; note = uracil
  modified_base 86: mod_base = OTHER; note = uracil
  modified_base 90: mod_base = OTHER; note = uracil
  modified_base 92: mod_base = OTHER; note = uracil
  modified_base 108: mod_base = OTHER; note = uracil
  modified_base 110: mod_base = OTHER; note = uracil
  modified_base 117: mod_base = OTHER; note = uracil
  modified_base 119..120: mod_base = OTHER; note = uracil
  modified_base 122..124: mod_base = OTHER; note = uracil
  modified_base 129: mod_base = OTHER; note = uracil
  modified_base 139: mod_base = OTHER; note = uracil
  modified_base 146..147: mod_base = OTHER; note = uracil
  modified_base 154: mod_base = OTHER; note = uracil
  modified_base 156: mod_base = OTHER; note = uracil
  modified_base 159..160: mod_base = OTHER; note = uracil
  modified_base 164..168: mod_base = OTHER; note = uracil
  modified_base 171: mod_base = OTHER; note = uracil
  modified_base 173..174: mod_base = OTHER; note = uracil
  modified_base 183..184: mod_base = OTHER; note = uracil
  modified_base 188: mod_base = OTHER; note = uracil
  modified_base 195: mod_base = OTHER; note = uracil
  modified_base 202..203: mod_base = OTHER; note = uracil
  modified_base 208..209: mod_base = OTHER; note = uracil
  modified_base 213: mod_base = OTHER; note = uracil
  modified_base 218: mod_base = OTHER; note = uracil
  modified_base 227: mod_base = OTHER; note = uracil
  modified_base 229: mod_base = OTHER; note = uracil
  modified_base 240..241: mod_base = OTHER; note = uracil
  modified_base 244: mod_base = OTHER; note = uracil
  modified_base 247: mod_base = OTHER; note = uracil
  modified_base 251..252: mod_base = OTHER; note = uracil
  modified_base 258: mod_base = OTHER; note = uracil
  modified_base 268: mod_base = OTHER; note = uracil
  modified_base 274..275: mod_base = OTHER; note = uracil
  modified_base 281: mod_base = OTHER; note = uracil
  modified_base 8: mod_base = m5c
  modified_base 30: mod_base = m5c
  modified_base 65: mod_base = m5c
  modified_base 93: mod_base = m5c
  modified_base 126: mod_base = m5c
  modified_base 140: mod_base = m5c
  modified_base 189: mod_base = m5c
  modified_base 276: mod_base = m5c
  variation 150: note = CpG site, residue is C if methylated or T(=U) if unmethylated

SEQ ID NO: 468 - DNA, 300 bp, synthetic construct; identical to SEQ ID NO: 464
  source 1..300: mol_type = other DNA
  modified_base 4: mod_base = OTHER; note = uracil
  modified_base 6..7: mod_base = OTHER; note = uracil
  modified_base 11: mod_base = OTHER; note = uracil
  modified_base 15: mod_base = OTHER; note = uracil
  modified_base 17: mod_base = OTHER; note = uracil
  modified_base 21: mod_base = OTHER; note = uracil
  modified_base 31: mod_base = OTHER; note = uracil
  modified_base 34..35: mod_base = OTHER; note = uracil
  modified_base 37: mod_base = OTHER; note = uracil
  modified_base 39..41: mod_base = OTHER; note = uracil
  modified_base 44: mod_base = OTHER; note = uracil
  modified_base 46..47: mod_base = OTHER; note = uracil
  modified_base 51..52: mod_base = OTHER; note = uracil
  modified_base 58: mod_base = OTHER; note = uracil
  modified_base 64: mod_base = OTHER; note = uracil
  modified_base 66: mod_base = OTHER; note = uracil
  modified_base 68..69: mod_base = OTHER; note = uracil
  modified_base 75..76: mod_base = OTHER; note = uracil
  modified_base 78..79: mod_base = OTHER; note = uracil
  modified_base 84: mod_base = OTHER; note = uracil
  modified_base 86: mod_base = OTHER; note = uracil
  modified_base 89..90: mod_base = OTHER; note = uracil
  modified_base 94..96: mod_base = OTHER; note = uracil
  modified_base 100: mod_base = OTHER; note = uracil
  modified_base 103: mod_base = OTHER; note = uracil
  modified_base 110: mod_base = OTHER; note = uracil
  modified_base 114..115: mod_base = OTHER; note = uracil
  modified_base 124..125: mod_base = OTHER; note = uracil
  modified_base 131: mod_base = OTHER; note = uracil
  modified_base 139: mod_base = OTHER; note = uracil
  modified_base 143: mod_base = OTHER; note = uracil
  modified_base 148..149: mod_base = OTHER; note = uracil
  modified_base 157: mod_base = OTHER; note = uracil
  modified_base 159: mod_base = OTHER; note = uracil
  modified_base 164..165: mod_base = OTHER; note = uracil
  modified_base 168: mod_base = OTHER; note = uracil
  modified_base 170: mod_base = OTHER; note = uracil
  modified_base 173: mod_base = OTHER; note = uracil
  modified_base 188: mod_base = OTHER; note = uracil
  modified_base 194: mod_base = OTHER; note = uracil
  modified_base 197: mod_base = OTHER; note = uracil
  modified_base 199: mod_base = OTHER; note = uracil
  modified_base 202: mod_base = OTHER; note = uracil
  modified_base 204..205: mod_base = OTHER; note = uracil
  modified_base 212: mod_base = OTHER; note = uracil
  modified_base 220: mod_base = OTHER; note = uracil
  modified_base 222: mod_base = OTHER; note = uracil
  modified_base 229: mod_base = OTHER; note = uracil
  modified_base 232: mod_base = OTHER; note = uracil
  modified_base 241: mod_base = OTHER; note = uracil
  modified_base 244..246: mod_base = OTHER; note = uracil
  modified_base 248: mod_base = OTHER; note = uracil
  modified_base 257..259: mod_base = OTHER; note = uracil
  modified_base 267: mod_base = OTHER; note = uracil
  modified_base 274..275: mod_base = OTHER; note = uracil
  modified_base 278: mod_base = OTHER; note = uracil
  modified_base 294: mod_base = OTHER; note = uracil
  modified_base 296: mod_base = OTHER; note = uracil
  modified_base 24: mod_base = m5c
  modified_base 111: mod_base = m5c
  modified_base 160: mod_base = m5c
  modified_base 174: mod_base = m5c
  modified_base 207: mod_base = m5c
  modified_base 235: mod_base = m5c
  modified_base 270: mod_base = m5c
  modified_base 292: mod_base = m5c
  variation 150: note = CpG site, residue is C if methylated or T(=U) if unmethylated

SEQ ID NO: 469 - DNA, 300 bp, synthetic construct
  source 1..300: mol_type = other DNA
  modified_base 13..14: mod_base = OTHER; note = uracil
  modified_base 25: mod_base = OTHER; note = uracil
  modified_base 30: mod_base = OTHER; note = uracil
  modified_base 43: mod_base = OTHER; note = uracil
  modified_base 47: mod_base = OTHER; note = uracil
  modified_base 57: mod_base = OTHER; note = uracil
  modified_base 72: mod_base = OTHER; note = uracil
  modified_base 81: mod_base = OTHER; note = uracil
  modified_base 85: mod_base = OTHER; note = uracil
  modified_base 99: mod_base = OTHER; note = uracil
  modified_base 132..133: mod_base = OTHER; note = uracil
  modified_base 137: mod_base = OTHER; note = uracil
  modified_base 164: mod_base = OTHER; note = uracil
  modified_base 177: mod_base = OTHER; note = uracil
  modified_base 183: mod_base = OTHER; note = uracil
  modified_base 185: mod_base = OTHER; note = uracil
  modified_base 191: mod_base = OTHER; note = uracil
  modified_base 196: mod_base = OTHER; note = uracil
  modified_base 198: mod_base = OTHER; note = uracil
  modified_base 203: mod_base = OTHER; note = uracil
  modified_base 247: mod_base = OTHER; note = uracil
  modified_base 253: mod_base = OTHER; note = uracil
  modified_base 263: mod_base = OTHER; note = uracil
  modified_base 266: mod_base = OTHER; note = uracil
  modified_base 278: mod_base = OTHER; note = uracil
  modified_base 291: mod_base = OTHER; note = uracil
  modified_base 2: mod_base = m5c
  modified_base 74: mod_base = m5c
  modified_base 86: mod_base = m5c
  modified_base 106: mod_base = m5c
  modified_base 134: mod_base = m5c
  modified_base 171: mod_base = m5c
  variation 151: note = CpG site, residue is C if methylated or T(=U) if unmethylated
gcgaataaaaagttagtgtgtgagtaagtttgtgggaagatgtatgtagagtgtgatagagagtttaggggttcgtgtgataattcgtggaaatgtttttaaaggcgagggtatgtgtgtgggtgtgaggattcggttgttggatgtttaygtattttattagttagatacgggagttaatatttaattgtagtgtattaaatattattaggtgggtatgattttgagggaatgagggaagggagataaggtttggtgagattatttgtgggattatttgtgtgtatttgttggtttgta

SEQ ID NO: 470 - DNA, 300 bp, synthetic construct
  source 1..300: mol_type = other DNA
  modified_base 3: mod_base = OTHER; note = uracil
  modified_base 7..8: mod_base = OTHER; note = uracil
  modified_base 11: mod_base = OTHER; note = uracil
  modified_base 17: mod_base = OTHER; note = uracil
  modified_base 19: mod_base = OTHER; note = uracil
  modified_base 21: mod_base = OTHER; note = uracil
  modified_base 29..31: mod_base = OTHER; note = uracil
  modified_base 33: mod_base = OTHER; note = uracil
  modified_base 41: mod_base = OTHER; note = uracil
  modified_base 43: mod_base = OTHER; note = uracil
  modified_base 45..46: mod_base = OTHER; note = uracil
  modified_base 50..51: mod_base = OTHER; note = uracil
  modified_base 56: mod_base = OTHER; note = uracil
  modified_base 58..60: mod_base = OTHER; note = uracil
  modified_base 63..65: mod_base = OTHER; note = uracil
  modified_base 67: mod_base = OTHER; note = uracil
  modified_base 71..73: mod_base = OTHER; note = uracil
  modified_base 75: mod_base = OTHER; note = uracil
  modified_base 81: mod_base = OTHER; note = uracil
  modified_base 85..87: mod_base = OTHER; note = uracil
  modified_base 89..90: mod_base = OTHER; note = uracil
  modified_base 106: mod_base = OTHER; note = uracil
  modified_base 108: mod_base = OTHER; note = uracil
  modified_base 111: mod_base = OTHER; note = uracil
  modified_base 125: mod_base = OTHER; note = uracil
  modified_base 127..128: mod_base = OTHER; note = uracil
  modified_base 134: mod_base = OTHER; note = uracil
  modified_base 138: mod_base = OTHER; note = uracil
  modified_base 155: mod_base = OTHER; note = uracil
  modified_base 158..159: mod_base = OTHER; note = uracil
  modified_base 162: mod_base = OTHER; note = uracil
  modified_base 165: mod_base = OTHER; note = uracil
  modified_base 171..172: mod_base = OTHER; note = uracil
  modified_base 174: mod_base = OTHER; note = uracil
  modified_base 176: mod_base = OTHER; note = uracil
  modified_base 178..180: mod_base = OTHER; note = uracil
  modified_base 182: mod_base = OTHER; note = uracil
  modified_base 184: mod_base = OTHER; note = uracil
  modified_base 186: mod_base = OTHER; note = uracil
  modified_base 190..192: mod_base = OTHER; note = uracil
  modified_base 196..197: mod_base = OTHER; note = uracil
  modified_base 206: mod_base = OTHER; note = uracil
  modified_base 211..212: mod_base = OTHER; note = uracil
  modified_base 222: mod_base = OTHER; note = uracil
  modified_base 224: mod_base = OTHER; note = uracil
  modified_base 230..233: mod_base = OTHER; note = uracil
  modified_base 238: mod_base = OTHER; note = uracil
  modified_base 240: mod_base = OTHER; note = uracil
  modified_base 242: mod_base = OTHER; note = uracil
  modified_base 246: mod_base = OTHER; note = uracil
  modified_base 248: mod_base = OTHER; note = uracil
  modified_base 250: mod_base = OTHER; note = uracil
  modified_base 252: mod_base = OTHER; note = uracil
  modified_base 255: mod_base = OTHER; note = uracil
  modified_base 259: mod_base = OTHER; note = uracil
  modified_base 262: mod_base = OTHER; note = uracil
  modified_base 265..267: mod_base = OTHER; note = uracil
  modified_base 269: mod_base = OTHER; note = uracil
  modified_base 273: mod_base = OTHER; note = uracil
  modified_base 277: mod_base = OTHER; note = uracil
  modified_base 279: mod_base = OTHER; note = uracil
  modified_base 281: mod_base = OTHER; note = uracil
  modified_base 283: mod_base = OTHER; note = uracil
  modified_base 285: mod_base = OTHER; note = uracil
  modified_base 289: mod_base = OTHER; note = uracil
  modified_base 300: mod_base = OTHER; note = uracil
  modified_base 129: mod_base = m5c
  modified_base 166: mod_base = m5c
  modified_base 194: mod_base = m5c
  modified_base 214: mod_base = m5c
  modified_base 226: mod_base = m5c
  modified_base 298: mod_base = m5c
  variation 149: note = CpG site, residue is C if methylated or T(=U) if unmethylated
tataaattagtaaatatatatagataattttatagatgattttattagattttgtttttttttttttatttttttaaaattatatttatttaataatgtttagtgtattgtaattgagtattagttttcgtatttagttaataaaataygtaaatatttaatagtcgggtttttatatttatatatatattttcgtttttagaaatatttttacggattgttatacgagtttttaaattttttgttatattttgtatgtatttttttatagatttgtttatatattggttttttattcgt

SEQ ID NO: 471 - DNA, 300 bp, synthetic construct
  source 1..300: mol_type = other DNA
  modified_base 1: mod_base = OTHER; note = uracil
  modified_base 8: mod_base = OTHER; note = uracil
  modified_base 15: mod_base = OTHER; note = uracil
  modified_base 19..20: mod_base = OTHER; note = uracil
  modified_base 22: mod_base = OTHER; note = uracil
  modified_base 25: mod_base = OTHER; note = uracil
  modified_base 27: mod_base = OTHER; note = uracil
  modified_base 29..30: mod_base = OTHER; note = uracil
  modified_base 33..34: mod_base = OTHER; note = uracil
  modified_base 52: mod_base = OTHER; note = uracil
  modified_base 54: mod_base = OTHER; note = uracil
  modified_base 58: mod_base = OTHER; note = uracil
  modified_base 60: mod_base = OTHER; note = uracil
  modified_base 79: mod_base = OTHER; note = uracil
  modified_base 84..86: mod_base = OTHER; note = uracil
  modified_base 102: mod_base = OTHER; note = uracil
  modified_base 109: mod_base = OTHER; note = uracil
  modified_base 123: mod_base = OTHER; note = uracil
  modified_base 125: mod_base = OTHER; note = uracil
  modified_base 130: mod_base = OTHER; note = uracil
  modified_base 132..134: mod_base = OTHER; note = uracil
  modified_base 136: mod_base = OTHER; note = uracil
  modified_base 138: mod_base = OTHER; note = uracil
  modified_base 141..142: mod_base = OTHER; note = uracil
  modified_base 145: mod_base = OTHER; note = uracil
  modified_base 147: mod_base = OTHER; note = uracil
  modified_base 157..159: mod_base = OTHER; note = uracil
  modified_base 161: mod_base = OTHER; note = uracil
  modified_base 165..167: mod_base = OTHER; note = uracil
  modified_base 178..181: mod_base = OTHER; note = uracil
  modified_base 194: mod_base = OTHER; note = uracil
  modified_base 202: mod_base = OTHER; note = uracil
  modified_base 204: mod_base = OTHER; note = uracil
  modified_base 209: mod_base = OTHER; note = uracil
  modified_base 211..212: mod_base = OTHER; note = uracil
  modified_base 215: mod_base = OTHER; note = uracil
  modified_base 217: mod_base = OTHER; note = uracil
  modified_base 220..221: mod_base = OTHER; note = uracil
  modified_base 224: mod_base = OTHER; note = uracil
  modified_base 226: mod_base = OTHER; note = uracil
  modified_base 236: mod_base = OTHER; note = uracil
  modified_base 240: mod_base = OTHER; note = uracil
  modified_base 244: mod_base = OTHER; note = uracil
  modified_base 246..249: mod_base = OTHER; note = uracil
  modified_base 257..260: mod_base = OTHER; note = uracil
  modified_base 264: mod_base = OTHER; note = uracil
  modified_base 270..271: mod_base = OTHER; note = uracil
  modified_base 274: mod_base = OTHER; note = uracil
  modified_base 277: mod_base = OTHER; note = uracil
  modified_base 279: mod_base = OTHER; note = uracil
  modified_base 283: mod_base = OTHER; note = uracil
  modified_base 288: mod_base = OTHER; note = uracil
  modified_base 291: mod_base = OTHER; note = uracil
  modified_base 295: mod_base = OTHER; note = uracil
  modified_base 17: mod_base = m5c
  modified_base 126: mod_base = m5c
  modified_base 173: mod_base = m5c
  modified_base 205: mod_base = m5c
  modified_base 229: mod_base = m5c
  variation 150: note = CpG site, residue is C if methylated or T(=U) if unmethylated
tagtgagttgagagtacgttattgtattttagtttgggggatagagtgagattttgttttaaaaaaagaaaaaaagaattgattttaaatgtgtggggagattgattttagtaataataaaatttcggttttttatatagttagttttgygtgaatttttttttttttattgcgatttttttgatttgagtgatagtaaaatttcggttttttgtatagttagttttgcgtgagttatttttttttttttgtaatttttttgttttgatttattagttttgtttgggtagtaggtaaggt

SEQ ID NO: 472 - DNA, 300 bp, synthetic construct
  source 1..300: mol_type = other DNA
  modified_base 2..3: mod_base = OTHER; note = uracil
  modified_base 7..8: mod_base = OTHER; note = uracil
  modified_base 11: mod_base = OTHER; note = uracil
  modified_base 14..16: mod_base = OTHER; note = uracil
  modified_base 20: mod_base = OTHER; note = uracil
  modified_base 25: mod_base = OTHER; note = uracil
  modified_base 34: mod_base = OTHER; note = uracil
  modified_base 39: mod_base = OTHER; note = uracil
  modified_base 50: mod_base = OTHER; note = uracil
  modified_base 67: mod_base = OTHER; note = uracil
  modified_base 69: mod_base = OTHER; note = uracil
  modified_base 73: mod_base = OTHER; note = uracil
  modified_base 78: mod_base = OTHER; note = uracil
  modified_base 82: mod_base = OTHER; note = uracil
  modified_base 87: mod_base = OTHER; note = uracil
  modified_base 94: mod_base = OTHER; note = uracil
  modified_base 105: mod_base = OTHER; note = uracil
  modified_base 109: mod_base = OTHER; note = uracil
  modified_base 111: mod_base = OTHER; note = uracil
  modified_base 113: mod_base = OTHER; note = uracil
  modified_base 118: mod_base = OTHER; note = uracil
  modified_base 129: mod_base = OTHER; note = uracil
  modified_base 148: mod_base = OTHER; note = uracil
  modified_base 152: mod_base = OTHER; note = uracil
  modified_base 157: mod_base = OTHER; note = uracil
  modified_base 161: mod_base = OTHER; note = uracil
  modified_base 173: mod_base = OTHER; note = uracil
  modified_base 190: mod_base = OTHER; note = uracil
  modified_base 197: mod_base = OTHER; note = uracil
  modified_base 201: mod_base = OTHER; note = uracil
  modified_base 203..206: mod_base = OTHER; note = uracil
  modified_base 208: mod_base = OTHER; note = uracil
  modified_base 210: mod_base = OTHER; note = uracil
  modified_base 220: mod_base = OTHER; note = uracil
  modified_base 225: mod_base = OTHER; note = uracil
  modified_base 233: mod_base = OTHER; note = uracil
  modified_base 245: mod_base = OTHER; note = uracil
  modified_base 251: mod_base = OTHER; note = uracil
  modified_base 253: mod_base = OTHER; note = uracil
  modified_base 255: mod_base = OTHER; note = uracil
  modified_base 257: mod_base = OTHER; note = uracil
  modified_base 261..265: mod_base = OTHER; note = uracil
  modified_base 269: mod_base = OTHER; note = uracil
  modified_base 277: mod_base = OTHER; note = uracil
  modified_base 287: mod_base = OTHER; note = uracil
  modified_base 289: mod_base = OTHER; note = uracil
  modified_base 291: mod_base = OTHER; note = uracil
  modified_base 294: mod_base = OTHER; note = uracil
  modified_base 296: mod_base = OTHER; note = uracil
  modified_base 298: mod_base = OTHER; note = uracil
  modified_base 71: mod_base = m5c
  modified_base 95: mod_base = m5c
  modified_base 127: mod_base = m5c
  modified_base 174: mod_base = m5c
  modified_base 283: mod_base = m5c
  variation 150: note = CpG site, residue is C if methylated or T(=U) if unmethylated
attttgtttgttgtttagatagagttgatggattaagataggggaattataggggagaaagaatgatttacgtagagttggttgtgtaggagatcggagttttattgttatttaaattaggggaatcgtaatagggaaagagggatttaygtagagttggttgtgtgggagatcggagttttattattattgaaattagtttttttatatatttgggattagttttttttttttttttttgagatagagttttattttattttttaggttggagtgtagtggcgtgtttttagtttattg

SEQ ID NO: 473 - DNA, 300 bp, synthetic construct
  source 1..300: mol_type = other DNA
  modified_base 14..15: mod_base = OTHER; note = uracil
  modified_base 18..21: mod_base = OTHER; note = uracil
  modified_base 24: mod_base = OTHER; note = uracil
  modified_base 26..27: mod_base = OTHER; note = uracil
  modified_base 29..32: mod_base = OTHER; note = uracil
  modified_base 34: mod_base = OTHER; note = uracil
  modified_base 37: mod_base = OTHER; note = uracil
  modified_base 43: mod_base = OTHER; note = uracil
  modified_base 49: mod_base = OTHER; note = uracil
  modified_base 51: mod_base = OTHER; note = uracil
  modified_base 53..56: mod_base = OTHER; note = uracil
  modified_base 58..61: mod_base = OTHER; note = uracil
  modified_base 69: mod_base = OTHER; note = uracil
  modified_base 77..78: mod_base = OTHER; note = uracil
  modified_base 86: mod_base = OTHER; note = uracil
  modified_base 93..94: mod_base = OTHER; note = uracil
  modified_base 96: mod_base = OTHER; note = uracil
  modified_base 98: mod_base = OTHER; note = uracil
  modified_base 102..103: mod_base = OTHER; note = uracil
  modified_base 105: mod_base = OTHER; note = uracil
  modified_base 108: mod_base = OTHER; note = uracil
  modified_base 112: mod_base = OTHER; note = uracil
  modified_base 124: mod_base = OTHER; note = uracil
  modified_base 126..128: mod_base = OTHER; note = uracil
  modified_base 132..135: mod_base = OTHER; note = uracil
  modified_base 137..138: mod_base = OTHER; note = uracil
  modified_base 140: mod_base = OTHER; note = uracil
  modified_base 159: mod_base = OTHER; note = uracil
  modified_base 161: mod_base = OTHER; note = uracil
  modified_base 163: mod_base = OTHER; note = uracil
  modified_base 169: mod_base = OTHER; note = uracil
  modified_base 171..172: mod_base = OTHER; note = uracil
  modified_base 190: mod_base = OTHER; note = uracil
  modified_base 193..194: mod_base = OTHER; note = uracil
  modified_base 199..200: mod_base = OTHER; note = uracil
  modified_base 206: mod_base = OTHER; note = uracil
  modified_base 208: mod_base = OTHER; note = uracil
  modified_base 213: mod_base = OTHER; note = uracil
  modified_base 215: mod_base = OTHER; note = uracil
  modified_base 218..219: mod_base = OTHER; note = uracil
  modified_base 221: mod_base = OTHER; note = uracil
  modified_base 224..226: mod_base = OTHER; note = uracil
  modified_base 231..234: mod_base = OTHER; note = uracil
  modified_base 239..240: mod_base = OTHER; note = uracil
  modified_base 253: mod_base = OTHER; note = uracil
  modified_base 258: mod_base = OTHER; note = uracil
  modified_base 269: mod_base = OTHER; note = uracil
  modified_base 272..273: mod_base = OTHER; note = uracil
  modified_base 275: mod_base = OTHER; note = uracil
  modified_base 277..278: mod_base = OTHER; note = uracil
  modified_base 286: mod_base = OTHER; note = uracil
  modified_base 288: mod_base = OTHER; note = uracil
  modified_base 297: mod_base = OTHER; note = uracil
  modified_base 299..300: mod_base = OTHER; note = uracil
  modified_base 7: mod_base = m5c
  modified_base 62: mod_base = m5c
  modified_base 141: mod_base = m5c
  modified_base 195: mod_base = m5c
  modified_base 209: mod_base = m5c
  modified_base 236: mod_base = m5c
  modified_base 249: mod_base = m5c
  modified_base 267: mod_base = m5c
  modified_base 291: mod_base = m5c
  variation 150: note = CpG site, residue is C if methylated or T(=U) if unmethylated
ggatgtcggtgtgttaattttagttttattttattgttaaagtttaagtttttttttttttcgttaagttgtatgattttgagttttttgtgttttattgtttttatttgttaagtgaaaatgtttttagtttttattttcgggagttgygtgggaggtatatatgaatattaggaaagtgagtttatgtagttcgggttagggatttcggtttttgtttttgttttaatttttacggtttgggggaacgtgtagggttgaggaagcgtagtttttttttggaattttagcggaagtttt

SEQ ID NO: 474 - DNA, 300 bp, synthetic construct
  source 1..300: mol_type = other DNA
  modified_base 5: mod_base = OTHER; note = uracil
  modified_base 8: mod_base = OTHER; note = uracil
  modified_base 11: mod_base = OTHER; note = uracil
  modified_base 19..20: mod_base = OTHER; note = uracil
  modified_base 30: mod_base = OTHER; note = uracil
  modified_base 35: mod_base = OTHER; note = uracil
  modified_base 38..39: mod_base = OTHER; note = uracil
  modified_base 41: mod_base = OTHER; note = uracil
  modified_base 44..46: mod_base = OTHER; note = uracil
  modified_base 49: mod_base = OTHER; note = uracil
  modified_base 55..59: mod_base = OTHER; note = uracil
  modified_base 63: mod_base = OTHER; note = uracil
  modified_base 78: mod_base = OTHER; note = uracil
  modified_base 84: mod_base = OTHER; note = uracil
  modified_base 90: mod_base = OTHER; note = uracil
  modified_base 97..99: mod_base = OTHER; note = uracil
  modified_base 103..104: mod_base = OTHER; note = uracil
  modified_base 109: mod_base = OTHER; note = uracil
  modified_base 112: mod_base = OTHER; note = uracil
  modified_base 118: mod_base = OTHER; note = uracil
  modified_base 120: mod_base = OTHER; note = uracil
  modified_base 122: mod_base = OTHER; note = uracil
  modified_base 126..127: mod_base = OTHER; note = uracil
  modified_base 135: mod_base = OTHER; note = uracil
  modified_base 143..144: mod_base = OTHER; note = uracil
  modified_base 146..148: mod_base = OTHER; note = uracil
  modified_base 152: mod_base = OTHER; note = uracil
  modified_base 155: mod_base = OTHER; note = uracil
  modified_base 157..158: mod_base = OTHER; note = uracil
  modified_base 171: mod_base = OTHER; note = uracil
  modified_base 178: mod_base = OTHER; note = uracil
  modified_base 184: mod_base = OTHER; note = uracil
  modified_base 186: mod_base = OTHER; note = uracil
  modified_base 191: mod_base = OTHER; note = uracil
  modified_base 201: mod_base = OTHER; note = uracil
  modified_base 209: mod_base = OTHER; note = uracil
  modified_base 211: mod_base = OTHER; note = uracil
  modified_base 218: mod_base = OTHER; note = uracil
  modified_base 220: mod_base = OTHER; note = uracil
  modified_base 226: mod_base = OTHER; note = uracil
  modified_base 230: mod_base = OTHER; note = uracil
  modified_base 233: mod_base = OTHER; note = uracil
  modified_base 253: mod_base = OTHER; note = uracil
  modified_base 259: mod_base = OTHER; note = uracil
  modified_base 265: mod_base = OTHER; note = uracil
  modified_base 278: mod_base = OTHER; note = uracil
  modified_base 288: mod_base = OTHER; note = uracil
  modified_base 290: mod_base = OTHER; note = uracil
  modified_base 292: mod_base = OTHER; note = uracil
  modified_base 296: mod_base = OTHER; note = uracil
  modified_base 299..300: mod_base = OTHER; note = uracil
  modified_base 9: mod_base = m5c
  modified_base 33: mod_base = m5c
  modified_base 51: mod_base = m5c
  modified_base 64: mod_base = m5c
  modified_base 91: mod_base = m5c
  modified_base 105: mod_base = m5c
  modified_base 159: mod_base = m5c
  modified_base 238: mod_base = m5c
  modified_base 293: mod_base = m5c
  variation 150: note = CpG site, residue is C if methylated or T(=U) if unmethylated
ggagttttcgttgagattttaaggagaggttgcgtttttttagttttgtacgtttttttaggtcgtggggattagggtagaggtagagatcggagtttttggttcgggttgtataaatttatttttttggtgtttatgtgtgttttttaygtaattttcggaggtggggattgggagtatttttatttgatagatgaggatagtgaggtataaagaatttaaggttatatagtttaacgggggaggggagagtttaagttttagtagtggggtggagttggggttggtatatcgatattt

SEQ ID NO: 475 - DNA, 300 bp, synthetic construct
  source 1..300: mol_type = other DNA
  modified_base 10: mod_base = OTHER; note = uracil
  modified_base 12: mod_base = OTHER; note = uracil
  modified_base 19: mod_base = OTHER; note = uracil
  modified_base 24..25: mod_base = OTHER; note = uracil
  modified_base 31: mod_base = OTHER; note = uracil
  modified_base 38..39: mod_base = OTHER; note = uracil
  modified_base 43: mod_base = OTHER; note = uracil
  modified_base 49: mod_base = OTHER; note = uracil
  modified_base 51: mod_base = OTHER; note = uracil
  modified_base 60..61: mod_base = OTHER; note = uracil
  modified_base 68: mod_base = OTHER; note = uracil
  modified_base 77: mod_base = OTHER; note = uracil
  modified_base 82: mod_base = OTHER; note = uracil
  modified_base 84..85: mod_base = OTHER; note = uracil
  modified_base 87: mod_base = OTHER; note = uracil
  modified_base 90: mod_base = OTHER; note = uracil
  modified_base 92..94: mod_base = OTHER; note = uracil
  modified_base 99: mod_base = OTHER; note = uracil
  modified_base 104: mod_base = OTHER; note = uracil
  modified_base 110: mod_base = OTHER; note = uracil
  modified_base 113..114: mod_base = OTHER; note = uracil
  modified_base 121..122: mod_base = OTHER; note = uracil
  modified_base 138: mod_base = OTHER; note = uracil
  modified_base 146: mod_base = OTHER; note = uracil
  modified_base 157..159: mod_base = OTHER; note = uracil
  modified_base 161..162: mod_base = OTHER; note = uracil
  modified_base 165..167: mod_base = OTHER; note = uracil
  modified_base 169..171: mod_base = OTHER; note = uracil
  modified_base 174: mod_base = OTHER; note = uracil
  modified_base 176: mod_base = OTHER; note = uracil
  modified_base 178..179: mod_base = OTHER; note = uracil
  modified_base 188: mod_base = OTHER; note = uracil
  modified_base 193: mod_base = OTHER; note = uracil
  modified_base 203: mod_base = OTHER; note = uracil
  modified_base 205: mod_base = OTHER; note = uracil
  modified_base 209: mod_base = OTHER; note = uracil
  modified_base 214: mod_base = OTHER; note = uracil
  modified_base 218: mod_base = OTHER; note = uracil
  modified_base 223: mod_base = OTHER; note = uracil
  modified_base 229: mod_base = OTHER; note = uracil
  modified_base 233..234: mod_base = OTHER; note = uracil
  modified_base 240: mod_base = OTHER; note = uracil
  modified_base 243: mod_base = OTHER; note = uracil
  modified_base 245: mod_base = OTHER; note = uracil
  modified_base 273: mod_base = OTHER; note = uracil
  modified_base 281: mod_base = OTHER; note = uracil
  modified_base 284: mod_base = OTHER; note = uracil
  modified_base 40: mod_base = m5c
  modified_base 63: mod_base = m5c
  modified_base 97: mod_base = m5c
  modified_base 123: mod_base = m5c
  modified_base 141: mod_base = m5c
  modified_base 219: mod_base = m5c
  modified_base 226: mod_base = m5c
  modified_base 246: mod_base = m5c
  variation 150: note = CpG site, residue is C if methylated or T(=U) if unmethylated
taattgaattatataatttatttttattatttgagttttcggtttaggttttttgagtattacgaattaggaatgattatgttttattttatttttcgttagttaaagattgttaggaggttcggggttgtggtatttaacgttatagaygtaaggtttttttgtttatttagtattttaaatattttatgatatatgaaggttttgatattgtaaatcggattacgataagtttttgattttttcgggttgtgaggagttttagaaaataattgagaagtaatttttttgaggatgatg

SEQ ID NO: 476 - DNA, 300 bp, synthetic construct
  source 1..300: mol_type = other DNA
  modified_base 1: mod_base = OTHER; note = uracil
  modified_base 4: mod_base = OTHER; note = uracil
  modified_base 7..8: mod_base = OTHER; note = uracil
  modified_base 10: mod_base = OTHER; note = uracil
  modified_base 21: mod_base = OTHER; note = uracil
  modified_base 24: mod_base = OTHER; note = uracil
  modified_base 26: mod_base = OTHER; note = uracil
  modified_base 36: mod_base = OTHER; note = uracil
  modified_base 42: mod_base = OTHER; note = uracil
  modified_base 44..45: mod_base = OTHER; note = uracil
  modified_base 47: mod_base = OTHER; note = uracil
  modified_base 49: mod_base = OTHER; note = uracil
  modified_base 52..53: mod_base = OTHER; note = uracil
  modified_base 63: mod_base = OTHER; note = uracil
  modified_base 69: mod_base = OTHER; note = uracil
  modified_base 80: mod_base = OTHER; note = uracil
  modified_base 88: mod_base = OTHER; note = uracil
  modified_base 94: mod_base = OTHER; note = uracil
  modified_base 99..100: mod_base = OTHER; note = uracil
  modified_base 103: mod_base = OTHER; note = uracil
  modified_base 110: mod_base = OTHER; note = uracil
  modified_base 128: mod_base = OTHER; note = uracil
  modified_base 137: mod_base = OTHER; note = uracil
  modified_base 145..146: mod_base = OTHER; note = uracil
  modified_base 153: mod_base = OTHER; note = uracil
  modified_base 168..169: mod_base = OTHER; note = uracil
  modified_base 171: mod_base = OTHER; note = uracil
  modified_base 174..176: mod_base = OTHER; note = uracil
  modified_base 181..182: mod_base = OTHER; note = uracil
  modified_base 184..185: mod_base = OTHER; note = uracil
  modified_base 189: mod_base = OTHER; note = uracil
  modified_base 193: mod_base = OTHER; note = uracil
  modified_base 199: mod_base = OTHER; note = uracil
  modified_base 220: mod_base = OTHER; note = uracil
  modified_base 226: mod_base = OTHER; note = uracil
  modified_base 230..231: mod_base = OTHER; note = uracil
  modified_base 244: mod_base = OTHER; note = uracil
  modified_base 246: mod_base = OTHER; note = uracil
  modified_base 253..254: mod_base = OTHER; note = uracil
  modified_base 259: mod_base = OTHER; note = uracil
  modified_base 266: mod_base = OTHER; note = uracil
  modified_base 268: mod_base = OTHER; note = uracil
  modified_base 295: mod_base = OTHER; note = uracil
  modified_base 54: mod_base = m5c
  modified_base 74: mod_base = m5c
  modified_base 81: mod_base = m5c
  modified_base 159: mod_base = m5c
  modified_base 177: mod_base = m5c
  modified_base 203: mod_base = m5c
  modified_base 237: mod_base = m5c
  modified_base 260: mod_base = m5c
  variation 150: note = CpG site, residue is C if methylated or T(=U) if unmethylated
tattatttttaaaaaagttgttttttagttattttttaaaattttttataattcggagaagttaaaggtttgtcgtagttcggtttgtaatgttagagtttttatatgttatgaaatatttggagtgttgggtgggtaggagggttttaygtttgtaacgttgaatattataatttcgggttttttggtagtttttgattagcgaagggtgaagtggagtatagttatttttgattcgtggtatttaaagagtttaagtcgggaatttagataatggaaatgaattatgtgatttaatta

SEQ ID NO: 477 - DNA, 300 bp, synthetic construct
  source 1..300: mol_type = other DNA
  modified_base 1: mod_base = OTHER; note = uracil
  modified_base 4: mod_base = OTHER; note = uracil
  modified_base 8..9: mod_base = OTHER; note = uracil
  modified_base 16..17: mod_base = OTHER; note = uracil
  modified_base 20: mod_base = OTHER; note = uracil
  modified_base 23..24: mod_base = OTHER; note = uracil
  modified_base 29..30: mod_base = OTHER; note = uracil
  modified_base 35: mod_base = OTHER; note = uracil
  modified_base 39: mod_base = OTHER; note = uracil
  modified_base 48: mod_base = OTHER; note = uracil
  modified_base 50: mod_base = OTHER; note = uracil
  modified_base 52: mod_base = OTHER; note = uracil
  modified_base 54: mod_base = OTHER; note = uracil
  modified_base 66..67: mod_base = OTHER; note = uracil
  modified_base 73..74: mod_base = OTHER; note = uracil
  modified_base 78..80: mod_base = OTHER; note = uracil
  modified_base 88: mod_base = OTHER; note = uracil
  modified_base 93: mod_base = OTHER; note = uracil
  modified_base 99: mod_base = OTHER; note = uracil
  modified_base 114: mod_base = OTHER; note = uracil
  modified_base 117: mod_base = OTHER; note = uracil
  modified_base 120: mod_base = OTHER; note = uracil
  modified_base 122..124: mod_base = OTHER; note = uracil
  modified_base 128: mod_base = OTHER; note = uracil
  modified_base 136: mod_base = OTHER; note = uracil
  modified_base 138: mod_base = OTHER; note = uracil
  modified_base 145: mod_base = OTHER; note = uracil
  modified_base 155..157: mod_base = OTHER; note = uracil
  modified_base 159: mod_base = OTHER; note = uracil
  modified_base 161..164: mod_base = OTHER; note = uracil
  modified_base 166: mod_base = OTHER; note = uracil
  modified_base 174: mod_base = OTHER; note = uracil
  modified_base 177: mod_base = OTHER; note = uracil
  modified_base 181: mod_base = OTHER; note = uracil
  modified_base 185..186: mod_base = OTHER; note = uracil
  modified_base 194: mod_base = OTHER; note = uracil
  modified_base 198..199: mod_base = OTHER; note = uracil
  modified_base 205: mod_base = OTHER; note = uracil
  modified_base 208..209: mod_base = OTHER; note = uracil
  modified_base 212: mod_base = OTHER; note = uracil
  modified_base 221: mod_base = OTHER; note = uracil
  modified_base 226: mod_base = OTHER; note = uracil
  modified_base 232: mod_base = OTHER; note = uracil
  modified_base 235..236: mod_base = OTHER; note = uracil
  modified_base 243: mod_base = OTHER; note = uracil
  modified_base 246..247: mod_base = OTHER; note = uracil
  modified_base 250: mod_base = OTHER; note = uracil
  modified_base 254: mod_base = OTHER; note = uracil
  modified_base 256: mod_base = OTHER; note = uracil
  modified_base 261: mod_base = OTHER; note = uracil
  modified_base 271: mod_base = OTHER; note = uracil
  modified_base 273..277: mod_base = OTHER; note = uracil
  modified_base 279: mod_base = OTHER; note = uracil
  modified_base 284: mod_base = OTHER; note = uracil
  modified_base 287: mod_base = OTHER; note = uracil
  modified_base 289: mod_base = OTHER; note = uracil
  modified_base 292: mod_base = OTHER; note = uracil
  modified_base 296..297: mod_base = OTHER; note = uracil
  modified_base 299..300: mod_base = OTHER; note = uracil
  modified_base 83: mod_base = m5c
  modified_base 89: mod_base = m5c
  modified_base 237: mod_base = m5c
  variation 149: note = CpG site, residue is C if methylated or T(=U) if unmethylated
  variation 196: note = CpG site, residue is C if methylated or T(=U) if unmethylated
taatattttttgtatttagtattttttgttatgttattttatagatgtttttattaaagtgatggttaatttttttatttttcgaattcgggttttggtaaatgggatgttaataatagtttttaaatagaggattatatagtatttgygtgagtttattttttttttatgttttttaagtatgttatgagaataygtttgggttagtttgttgaaggagttgagttgagttatttcggtgatagttagttgatttttagtagtgagaggtatttttataaagttgttttgttgattatt

SEQ ID NO: 478 - DNA, 300 bp, synthetic construct
  source 1..300: mol_type = other DNA
  modified_base 6: mod_base = OTHER; note = uracil
  modified_base 9: mod_base = OTHER; note = uracil
  modified_base 14: mod_base = OTHER; note = uracil
  modified_base 17: mod_base = OTHER; note = uracil
  modified_base 30..31: mod_base = OTHER; note = uracil
  modified_base 33: mod_base = OTHER; note = uracil
  modified_base 35: mod_base = OTHER; note = uracil
  modified_base 37: mod_base = OTHER; note = uracil
  modified_base 40: mod_base = OTHER; note = uracil
  modified_base 48: mod_base = OTHER; note = uracil
  modified_base 51: mod_base = OTHER; note = uracil
  modified_base 55: mod_base = OTHER; note = uracil
  modified_base 59: mod_base = OTHER; note = uracil
  modified_base 61: mod_base = OTHER; note = uracil
  modified_base 70: mod_base = OTHER; note = uracil
  modified_base 72: mod_base = OTHER; note = uracil
  modified_base 75: mod_base = OTHER; note = uracil
  modified_base 77: mod_base = OTHER; note = uracil
  modified_base 80: mod_base = OTHER; note = uracil
  modified_base 82..83: mod_base = OTHER; note = uracil
  modified_base 86: mod_base = OTHER; note = uracil
  modified_base 89: mod_base = OTHER; note = uracil
  modified_base 93: mod_base = OTHER; note = uracil
  modified_base 97..99: mod_base = OTHER; note = uracil
  modified_base 109: mod_base = OTHER; note = uracil
  modified_base 111: mod_base = OTHER; note = uracil
  modified_base 116: mod_base = OTHER; note = uracil
  modified_base 120: mod_base = OTHER; note = uracil
  modified_base 129: mod_base = OTHER; note = uracil
  modified_base 146: mod_base = OTHER; note = uracil
  modified_base 148: mod_base = OTHER; note = uracil
  modified_base 152: mod_base = OTHER; note = uracil
  modified_base 158: mod_base = OTHER; note = uracil
  modified_base 167..168: mod_base = OTHER; note = uracil
  modified_base 170: mod_base = OTHER; note = uracil
  modified_base 181: mod_base = OTHER; note = uracil
  modified_base 191: mod_base = OTHER; note = uracil
  modified_base 194..196: mod_base = OTHER; note = uracil
  modified_base 202..203: mod_base = OTHER; note = uracil
  modified_base 208..209: mod_base = OTHER; note = uracil
  modified_base 235..236: mod_base = OTHER; note = uracil
  modified_base 239: mod_base = OTHER; note = uracil
  modified_base 241: mod_base = OTHER; note = uracil
  modified_base 253: mod_base = OTHER; note = uracil
  modified_base 256: mod_base = OTHER; note = uracil
  modified_base 267: mod_base = OTHER; note = uracil
  modified_base 272: mod_base = OTHER; note = uracil
  modified_base 281: mod_base = OTHER; note = uracil
  modified_base 288: mod_base = OTHER; note = uracil
  modified_base 300: mod_base = OTHER; note = uracil
  modified_base 62: mod_base = m5c
  modified_base 210: mod_base = m5c
  modified_base 216: mod_base = m5c
  variation 103: note = CpG site, residue is C if methylated or T(=U) if unmethylated
  variation 150: note = CpG site, residue is C if methylated or T(=U) if unmethylated
gtggttagtagagtagttttgtgggggtgttttttattgttaagagttagttggttgttatcgggatgatttagtttagtttttttagtaggttgatttaggygtgtttttatggtatgtttgaagaatataagaggggagtgggtttaygtaagtattatgtgattttttgtttgggagttgttgttaatattttatttgttaaagttcggattcgaagggtaaggaaattggttattattttagtgagagtatttatagaatgatatggtaaaggatgttggatataaggaatgttgt

SEQ ID NO: 479 - DNA, 300 bp, synthetic construct
  source 1..300: mol_type = other DNA
  modified_base 2: mod_base = OTHER; note = uracil
  modified_base 4: mod_base = OTHER; note = uracil
  modified_base 6: mod_base = OTHER; note = uracil
  modified_base 8: mod_base = OTHER; note = uracil
  modified_base 20..21: mod_base = OTHER; note = uracil
  modified_base 27..28: mod_base = OTHER; note = uracil
  modified_base 32..34: mod_base = OTHER; note = uracil
  modified_base 42: mod_base = OTHER; note = uracil
  modified_base 47: mod_base = OTHER; note = uracil
  modified_base 53: mod_base = OTHER; note = uracil
  modified_base 68: mod_base = OTHER; note = uracil
  modified_base 71: mod_base = OTHER; note = uracil
  modified_base 74: mod_base = OTHER; note = uracil
  modified_base 76..78: mod_base = OTHER; note = uracil
  modified_base 82: mod_base = OTHER; note = uracil
  modified_base 90: mod_base = OTHER; note = uracil
  modified_base 92: mod_base = OTHER; note = uracil
  modified_base 99: mod_base = OTHER; note = uracil
  modified_base 109..111: mod_base = OTHER; note = uracil
  modified_base 113: mod_base = OTHER; note = uracil
  modified_base 115..118: mod_base = OTHER; note = uracil
  modified_base 120: mod_base = OTHER; note = uracil
  modified_base 128: mod_base = OTHER; note = uracil
  modified_base 131: mod_base = OTHER; note = uracil
  modified_base 135: mod_base = OTHER; note = uracil
  modified_base 139..140: mod_base = OTHER; note = uracil
  modified_base 148: mod_base = OTHER; note = uracil
  modified_base 152..153: mod_base = OTHER; note = uracil
  modified_base 159: mod_base = OTHER; note = uracil
  modified_base 162..163: mod_base = OTHER; note = uracil
  modified_base 166: mod_base = OTHER; note = uracil
  modified_base 175: mod_base = OTHER; note = uracil
  modified_base 180: mod_base = OTHER; note = uracil
  modified_base 186: mod_base = OTHER; note = uracil
  modified_base 189..190: mod_base = OTHER; note = uracil
  modified_base 197: mod_base = OTHER; note = uracil
  modified_base 200..201: mod_base = OTHER; note = uracil
  modified_base 204: mod_base = OTHER; note = uracil
  modified_base 208: mod_base = OTHER; note = uracil
  modified_base 210: mod_base = OTHER; note = uracil
  modified_base 215: mod_base = OTHER; note = uracil
  modified_base 225: mod_base = OTHER; note = uracil
  modified_base 227..231: mod_base = OTHER; note = uracil
  modified_base 233: mod_base = OTHER; note = uracil
  modified_base 238: mod_base = OTHER; note = uracil
  modified_base 241: mod_base = OTHER; note = uracil
  modified_base 243: mod_base = OTHER; note = uracil
  modified_base 246: mod_base = OTHER; note = uracil
  modified_base 250..251: mod_base = OTHER; note = uracil
  modified_base 253..256: mod_base = OTHER; note = uracil
  modified_base 260: mod_base = OTHER; note = uracil
  modified_base 262: mod_base = OTHER; note = uracil
  modified_base 268: mod_base = OTHER; note = uracil
  modified_base 283..284: mod_base = OTHER; note = uracil
  modified_base 289: mod_base = OTHER; note = uracil
  modified_base 294: mod_base = OTHER; note = uracil
  modified_base 296: mod_base = OTHER; note = uracil
  modified_base 37: mod_base = m5c
  modified_base 43: mod_base = m5c
  modified_base 191: mod_base = m5c
  modified_base 264: mod_base = m5c
  variation 103: note = CpG site, residue is C if methylated or T(=U) if unmethylated
  variation 150: note = CpG site, residue is C if methylated or T(=U) if unmethylated
gtttttattaaagtgatggttaatttttttatttttcgaattcgggttttggtaaatgggatgttaataatagtttttaaatagaggattatatagtatttgygtgagtttattttttttttatgttttttaagtatgttatgagaataygtttgggttagtttgttgaaggagttgagttgagttatttcggtgatagttagttgatttttagtagtgagaggtatttttataaagttgttttgttgattattttagatatacgagtaaaagaaatgtttattattatatgttattgag

SEQ ID NO: 480 - DNA, 300 bp, synthetic construct
  source 1..300: mol_type = other DNA
  modified_base 2: mod_base = OTHER; note = uracil
  modified_base 8: mod_base = OTHER; note = uracil
  modified_base 22: mod_base = OTHER; note = uracil
  modified_base 27: mod_base = OTHER; note = uracil
  modified_base 33: mod_base = OTHER; note = uracil
  modified_base 42: mod_base = OTHER; note = uracil
  modified_base 52: mod_base = OTHER; note = uracil
  modified_base 55: mod_base = OTHER; note = uracil
  modified_base 60: mod_base = OTHER; note = uracil
  modified_base 63: mod_base = OTHER; note = uracil
  modified_base 76..77: mod_base = OTHER; note = uracil
  modified_base 79: mod_base = OTHER; note = uracil
  modified_base 81: mod_base = OTHER; note = uracil
  modified_base 83: mod_base = OTHER; note = uracil
  modified_base 86: mod_base = OTHER; note = uracil
  modified_base 94: mod_base = OTHER; note = uracil
  modified_base 97: mod_base = OTHER; note = uracil
  modified_base 101: mod_base = OTHER; note = uracil
  modified_base 105: mod_base = OTHER; note = uracil
  modified_base 107: mod_base = OTHER; note = uracil
  modified_base 116: mod_base = OTHER; note = uracil
  modified_base 118: mod_base = OTHER; note = uracil
  modified_base 121: mod_base = OTHER; note = uracil
  modified_base 123: mod_base = OTHER; note = uracil
  modified_base 126: mod_base = OTHER; note = uracil
  modified_base 128..129: mod_base = OTHER; note = uracil
  modified_base 132: mod_base = OTHER; note = uracil
  modified_base 135: mod_base = OTHER; note = uracil
  modified_base 139: mod_base = OTHER; note = uracil
  modified_base 143..145: mod_base = OTHER; note = uracil
  modified_base 155: mod_base = OTHER; note = uracil
  modified_base 157: mod_base = OTHER; note = uracil
  modified_base 162: mod_base = OTHER; note = uracil
  modified_base 166: mod_base = OTHER; note = uracil
  modified_base 175: mod_base = OTHER; note = uracil
  modified_base 192: mod_base = OTHER; note = uracil
  modified_base 194: mod_base = OTHER; note = uracil
  modified_base 198: mod_base = OTHER; note = uracil
  modified_base 204: mod_base = OTHER; note = uracil
  modified_base 213..214: mod_base = OTHER; note = uracil
  modified_base 216: mod_base = OTHER; note = uracil
  modified_base 227: mod_base = OTHER; note = uracil
  modified_base 237: mod_base = OTHER; note = uracil
  modified_base 240..242: mod_base = OTHER; note = uracil
  modified_base 248..249: mod_base = OTHER; note = uracil
  modified_base 254..255: mod_base = OTHER; note = uracil
  modified_base 281..282: mod_base = OTHER; note = uracil
  modified_base 285: mod_base = OTHER; note = uracil
  modified_base 287: mod_base = OTHER; note = uracil
  modified_base 299: mod_base = OTHER; note = uracil
  modified_base 35: mod_base = m5c
  modified_base 108: mod_base = m5c
  modified_base 256: mod_base = m5c
  modified_base 262: mod_base = m5c
  variation 149: note = CpG site, residue is C if methylated or T(=U) if unmethylated
  variation 196: note = CpG site, residue is C if methylated or T(=U) if unmethylated
ttagtgatatgtaatggtaaatattttttttgttcgtgtgtttggggtggttagtagagtagttttgtgggggtgttttttattgttaagagttagttggttgttatcgggatgatttagtttagtttttttagtaggttgatttaggygtgtttttatggtatgtttgaagaatataagaggggagtgggtttaygtaagtattatgtgattttttgtttgggagttgttgttaatattttatttgttaaagttcggattcgaagggtaaggaaattggttattattttagtgagagta

SEQ ID NO: 481 - DNA, 300 bp, synthetic construct
  source 1..300: mol_type = other DNA
  modified_base 1..4: mod_base = OTHER; note = uracil
  modified_base 7..8: mod_base = OTHER; note = uracil
  modified_base 12..13: mod_base = OTHER; note = uracil
  modified_base 15: mod_base = OTHER; note = uracil
  modified_base 20: mod_base = OTHER; note = uracil
  modified_base 23..28: mod_base = OTHER; note = uracil
  modified_base 31: mod_base = OTHER; note = uracil
  modified_base 33..34: mod_base = OTHER; note = uracil
  modified_base 39: mod_base = OTHER; note = uracil
  modified_base 43: mod_base = OTHER; note = uracil
  modified_base 46: mod_base = OTHER; note = uracil
  modified_base 51..53: mod_base = OTHER; note = uracil
  modified_base 59..60: mod_base = OTHER; note = uracil
  modified_base 63: mod_base = OTHER; note = uracil
  modified_base 65..67: mod_base = OTHER; note = uracil
  modified_base 70: mod_base = OTHER; note = uracil
  modified_base 76: mod_base = OTHER; note = uracil
  modified_base 79: mod_base = OTHER; note = uracil
  modified_base 81..82: mod_base = OTHER; note = uracil
  modified_base 89..90: mod_base = OTHER; note = uracil
  modified_base 95..98: mod_base = OTHER; note = uracil
  modified_base 100: mod_base = OTHER; note = uracil
  modified_base 103: mod_base = OTHER; note = uracil
  modified_base 106: mod_base = OTHER; note = uracil
  modified_base 112: mod_base = OTHER; note = uracil
  modified_base 118..119: mod_base = OTHER; note = uracil
  modified_base 127: mod_base = OTHER; note = uracil
  modified_base 132..133: mod_base = OTHER; note = uracil
  modified_base 136..138: mod_base = OTHER; note = uracil
  modified_base 140: mod_base = OTHER; note = uracil
  modified_base 144..145: mod_base = OTHER; note = uracil
  modified_base 147..148: mod_base = OTHER; note = uracil
  modified_base 153..154: mod_base = OTHER; note = uracil
  modified_base 156: mod_base = OTHER; note = uracil
  modified_base 159: mod_base = OTHER; note = uracil
  modified_base 161..162: mod_base = OTHER; note = uracil
  modified_base 165: mod_base = OTHER; note = uracil
  modified_base 167..168: mod_base = OTHER; note = uracil
  modified_base 174..175: mod_base = OTHER; note = uracil
  modified_base 177..178: mod_base = OTHER; note = uracil
  modified_base 180: mod_base = OTHER; note = uracil
  modified_base 183..184: mod_base = OTHER; note = uracil
  modified_base 186: mod_base = OTHER; note = uracil
  modified_base 189..190: mod_base = OTHER; note = uracil
  modified_base 192..194: mod_base = OTHER; note = uracil
  modified_base 199..201: mod_base = OTHER; note = uracil
  modified_base 203..206: mod_base = OTHER; note = uracil
  modified_base 211: mod_base = OTHER; note = uracil
  modified_base 216: mod_base = OTHER; note = uracil
  modified_base 221..222: mod_base = OTHER; note = uracil
  modified_base 225..226: mod_base = OTHER; note = uracil
  modified_base 232: mod_base = OTHER; note = uracil
  modified_base 235: mod_base = OTHER; note = uracil
  modified_base 239..241: mod_base = OTHER; note = uracil
  modified_base 247: mod_base = OTHER; note = uracil
  modified_base 249: mod_base = OTHER; note = uracil
  modified_base 255: mod_base = OTHER; note = uracil
  modified_base 257..259: mod_base = OTHER; note = uracil
  modified_base 261..262: mod_base = OTHER; note = uracil
  modified_base 265..268: mod_base = OTHER; note = uracil
  modified_base 272: mod_base = OTHER; note = uracil
  modified_base 277: mod_base = OTHER; note = uracil
  modified_base 279: mod_base = OTHER; note = uracil
  modified_base 283: mod_base = OTHER; note = uracil
  modified_base 289..291: mod_base = OTHER; note = uracil
  modified_base 296..297: mod_base = OTHER; note = uracil
  modified_base 299: mod_base = OTHER; note = uracil
  modified_base 17: mod_base = m5c
  modified_base 44: mod_base = m5c
  modified_base 91: mod_base = m5c
  modified_base 141: mod_base = m5c
  modified_base 171: mod_base = m5c
  modified_base 181: mod_base = m5c
  modified_base 187: mod_base = m5c
  modified_base 214: mod_base = m5c
  modified_base 229: mod_base = m5c
  modified_base 252: mod_base = m5c
  modified_base 270: mod_base = m5c
  modified_base 273: mod_base = m5c
  variation 150: note = CpG site, residue is C if methylated or T(=U) if unmethylated
ttttagttaaattattcgattgttttttattatttatattggtcgtttttttttggagtttgtatttaatagtggtaatattttgtggttcgagtttttttttagtttggttagtggtttagtgagtatgattaatttatcggttttttygtttttagtattatttttagcggtttttttcgttttcgttttttagagtttatttttgagttgcgtagtgttatttaacgatagtagttttatttatttagcggtatttattttttttacgtcgaatattgatattttttttgagttata

SEQ ID NO: 482 - DNA, 300 bp, synthetic construct
  source 1..300: mol_type = other DNA
  modified_base 6: mod_base = OTHER; note = uracil
  modified_base 8: mod_base = OTHER; note = uracil
  modified_base 20: mod_base = OTHER; note = uracil
  modified_base 47: mod_base = OTHER; note = uracil
  modified_base 50: mod_base = OTHER; note = uracil
  modified_base 64: mod_base = OTHER; note = uracil
  modified_base 67: mod_base = OTHER; note = uracil
  modified_base 81: mod_base = OTHER; note = uracil
  modified_base 83: mod_base = OTHER; note = uracil
  modified_base 88: mod_base = OTHER; note = uracil
  modified_base 91: mod_base = OTHER; note = uracil
  modified_base 93: mod_base = OTHER; note = uracil
  modified_base 103: mod_base = OTHER; note = uracil
  modified_base 105: mod_base = OTHER; note = uracil
  modified_base 128: mod_base = OTHER; note = uracil
  modified_base 131: mod_base = OTHER; note = uracil
  modified_base 143: mod_base = OTHER; note = uracil
  modified_base 158: mod_base = OTHER; note = uracil
  modified_base 171: mod_base = OTHER; note = uracil
  modified_base 175: mod_base = OTHER; note = uracil
  modified_base 177: mod_base = OTHER; note = uracil
  modified_base 179: mod_base = OTHER; note = uracil
  modified_base 184..185: mod_base = OTHER; note = uracil
  modified_base 187: mod_base = OTHER; note = uracil
  modified_base 191..192: mod_base = OTHER; note = uracil
  modified_base 196: mod_base = OTHER; note = uracil
  modified_base 207: mod_base = OTHER; note = uracil
  modified_base 213..214: mod_base = OTHER; note = uracil
  modified_base 216: mod_base = OTHER; note = uracil
  modified_base 226..227: mod_base = OTHER; note = uracil
  modified_base 229: mod_base = OTHER; note = uracil
  modified_base 239: mod_base = OTHER; note = uracil
  modified_base 243: mod_base = OTHER; note = uracil
  modified_base 245..246: mod_base = OTHER; note = uracil
  modified_base 259..260: mod_base = OTHER; note = uracil
  modified_base 279: mod_base = OTHER; note = uracil
  modified_base 295: mod_base = OTHER; note = uracil
  modified_base 27: mod_base = m5c
  modified_base 30: mod_base = m5c
  modified_base 48: mod_base = m5c
  modified_base 71: mod_base = m5c
  modified_base 86: mod_base = m5c
  modified_base 113: mod_base = m5c
  modified_base 119: mod_base = m5c
  modified_base 129: mod_base = m5c
  modified_base 159: mod_base = m5c
  modified_base 209: mod_base = m5c
  modified_base 256: mod_base = m5c
  modified_base 283: mod_base = m5c
  variation 150: note = CpG site, residue is C if methylated or T(=U) if unmethylated
tgtggtttagggaaaatgttagtgttcggcgtggggaaggtgggtgtcgttgagtaaatgggattgttgtcgttggatggtattgcgtagtttaggggtgggttttgggaggcggaggcggaggaggtcgttggagatggtgttgaggaygaggaggtcggtgggttggttatgtttattaggttattgattaagttgaagaggggttcgggttataaggtgttgttattgttgggtgtaggttttagggaaaagcggttagtataggtgatggggggtagtcgagtggtttggttgggg

SEQ ID NO: 483 - DNA, 300 bp, synthetic construct
  source 1..300: mol_type = other DNA
  modified_base 2: mod_base = OTHER; note = uracil
  modified_base 8: mod_base = OTHER; note = uracil
  modified_base 13..17: mod_base = OTHER; note = uracil
  modified_base 19..24: mod_base = OTHER; note = uracil
  modified_base 31: mod_base = OTHER; note = uracil
  modified_base 33: mod_base = OTHER; note = uracil
  modified_base 38..40: mod_base = OTHER; note = uracil
  modified_base 45..46: mod_base = OTHER; note = uracil
  modified_base 49: mod_base = OTHER; note = uracil
  modified_base 69: mod_base = OTHER; note = uracil
  modified_base 73: mod_base = OTHER; note = uracil
  modified_base 75: mod_base = OTHER; note = uracil
  modified_base 84..85: mod_base = OTHER; note = uracil
  modified_base 87: mod_base = OTHER; note = uracil
  modified_base 95: mod_base = OTHER; note = uracil
  modified_base 99: mod_base = OTHER; note = uracil
  modified_base 104: mod_base = OTHER; note = uracil
  modified_base 107..109: mod_base = OTHER; note = uracil
  modified_base 111: mod_base = OTHER; note = uracil
  modified_base 118: mod_base = OTHER; note = uracil
  modified_base 131: mod_base = OTHER; note = uracil
  modified_base 137: mod_base = OTHER; note = uracil
  modified_base 144: mod_base = OTHER; note = uracil
  modified_base 148..149: mod_base = OTHER; note = uracil
  modified_base 154: mod_base = OTHER; note = uracil
  modified_base 157: mod_base = OTHER; note = uracil
  modified_base 160..161: mod_base = OTHER; note = uracil
  modified_base 170: mod_base = OTHER; note = uracil
  modified_base 180..181: mod_base = OTHER; note = uracil
  modified_base 187: mod_base = OTHER; note = uracil
  modified_base 189: mod_base = OTHER; note = uracil
  modified_base 193..195: mod_base = OTHER; note = uracil
  modified_base 198..199: mod_base = OTHER; note = uracil
  modified_base 202..204: mod_base = OTHER; note = uracil
  modified_base 208: mod_base = OTHER; note = uracil
  modified_base 212..214: mod_base = OTHER; note = uracil
  modified_base 216..217: mod_base = OTHER; note = uracil
  modified_base 220: mod_base = OTHER; note = uracil
  modified_base 223..226: mod_base = OTHER; note = uracil
  modified_base 229..232: mod_base = OTHER; note = uracil
  modified_base 235: mod_base = OTHER; note = uracil
  modified_base 240..241: mod_base = OTHER; note = uracil
  modified_base 246..247: mod_base = OTHER; note = uracil
  modified_base 256: mod_base = OTHER; note = uracil
  modified_base 259: mod_base = OTHER; note = uracil
  modified_base 262: mod_base = OTHER; note = uracil
  modified_base 266: mod_base = OTHER; note = uracil
  modified_base 269: mod_base = OTHER; note = uracil
  modified_base 271: mod_base = OTHER; note = uracil
  modified_base 274: mod_base = OTHER; note = uracil
  modified_base 277: mod_base = OTHER; note = uracil
  modified_base 282..284: mod_base = OTHER; note = uracil
  modified_base 291..292: mod_base = OTHER; note = uracil
  modified_base 294..296: mod_base = OTHER; note = uracil
  modified_base 298..299: mod_base = OTHER; note = uracil
  modified_base 50: mod_base = m5c
  modified_base 52: mod_base = m5c
  modified_base 59: mod_base = m5c
  modified_base 92: mod_base = m5c
  modified_base 96: mod_base = m5c
  modified_base 132: mod_base = m5c
  modified_base 138: mod_base = m5c
  modified_base 150: mod_base = m5c
  modified_base 164: mod_base = m5c
  modified_base 173: mod_base = m5c
  modified_base 182: mod_base = m5c
  modified_base 205: mod_base = m5c
  modified_base 218: mod_base = m5c
  variation 145: note = CpG site, residue is C if methylated or T(=U) if unmethylated
gtagtggttgggtttttattttttaggaaatttaaaattttgggttagtcgcgggtggcgggttggggtaggtataaagagggtttttgtgcggtcggttgggttgtttataggattttgggggaggaggtcggagtcggttttygtttcgttttgttttttgcggaggttgcggaatgttcggagttttggtttagtttgtttcgtttggtttattcgtagttttttttttattttttttagggttttggggtatagttgtagatttttttgtaatagggttttgagagttatttttta

SEQ ID NO: 484 - DNA, 300 bp, synthetic construct
  source 1..300: mol_type = other DNA
  modified_base 11: mod_base = OTHER; note = uracil
  modified_base 13: mod_base = OTHER; note = uracil
  modified_base 15: mod_base = OTHER; note = uracil
  modified_base 20..22: mod_base = OTHER; note = uracil
  modified_base 28: mod_base = OTHER; note = uracil
  modified_base 37: mod_base = OTHER; note = uracil
  modified_base 40: mod_base = OTHER; note = uracil
  modified_base 43: mod_base = OTHER; note = uracil
  modified_base 48..51: mod_base = OTHER; note = uracil
  modified_base 56..58: mod_base = OTHER; note = uracil
  modified_base 79: mod_base = OTHER; note = uracil
  modified_base 90..91: mod_base = OTHER; note = uracil
  modified_base 100: mod_base = OTHER; note = uracil
  modified_base 104: mod_base = OTHER; note = uracil
  modified_base 109..110: mod_base = OTHER; note = uracil
  modified_base 115: mod_base = OTHER; note = uracil
  modified_base 117: mod_base = OTHER; note = uracil
  modified_base 122: mod_base = OTHER; note = uracil
  modified_base 126: mod_base = OTHER; note = uracil
  modified_base 129: mod_base = OTHER; note = uracil
  modified_base 132..133: mod_base = OTHER; note = uracil
  modified_base 135: mod_base = OTHER; note = uracil
  modified_base 138: mod_base = OTHER; note = uracil
  modified_base 145: mod_base = OTHER; note = uracil
  modified_base 161: mod_base = OTHER; note = uracil
  modified_base 165: mod_base = OTHER; note = uracil
  modified_base 167: mod_base = OTHER; note = uracil
  modified_base 171..172: mod_base = OTHER; note = uracil
  modified_base 174..175: mod_base = OTHER; note = uracil
  modified_base 177..181: mod_base = OTHER; note = uracil
  modified_base 187..188: mod_base = OTHER; note = uracil
  modified_base 195: mod_base = OTHER; note = uracil
  modified_base 198..200: mod_base = OTHER; note = uracil
  modified_base 203: mod_base = OTHER; note = uracil
  modified_base 207: mod_base = OTHER; note = uracil
  modified_base 210: mod_base = OTHER; note = uracil
  modified_base 212: mod_base = OTHER; note = uracil
  modified_base 218..220: mod_base = OTHER; note = uracil
  modified_base 222: mod_base = OTHER; note = uracil
  modified_base 229..230: mod_base = OTHER; note = uracil
  modified_base 233..236: mod_base = OTHER; note = uracil
  modified_base 239..240: mod_base = OTHER; note = uracil
  modified_base 243..244: mod_base = OTHER; note = uracil
  modified_base 246..247: mod_base = OTHER; note = uracil
  modified_base 253: mod_base = OTHER; note = uracil
  modified_base 257..259: mod_base = OTHER; note = uracil
  modified_base 274..275: mod_base = OTHER; note = uracil
  modified_base 289..291: mod_base = OTHER; note = uracil
  modified_base 294..295: mod_base = OTHER; note = uracil
  modified_base 297: mod_base = OTHER; note = uracil
  modified_base 300: mod_base = OTHER; note = uracil
  modified_base 82: mod_base = m5c
  modified_base 95: mod_base = m5c
  modified_base 118: mod_base = m5c
  modified_base 127: mod_base = m5c
  modified_base 136: mod_base = m5c
  modified_base 155: mod_base = m5c
  modified_base 162: mod_base = m5c
  modified_base 168: mod_base = m5c
  modified_base 204: mod_base = m5c
  modified_base 208: mod_base = m5c
  modified_base 241: mod_base = m5c
  modified_base 248: mod_base = m5c
  modified_base 250: mod_base = m5c
  variation 150: note = CpG site, residue is C if methylated or T(=U) if unmethylated
tggagggtggtttttagggttttgttgtagagaagtttgtagttgtattttaaggttttggaaaagatggggaaggggttgcgggtgggttagacggggtaggttgggttagagtttcgggtatttcgtagttttcgtaggaagtagaaygggacggaaatcggtttcggtttttttttttagaattttgtgggtagtttagtcggtcgtatagaggttttttttgtgtttgttttaattcgttattcgcggttggtttagggttttgagttttttggggggtgggggtttagttattgt

SEQ ID NO: 485 - DNA, 300 bp, synthetic construct
  source 1..300: mol_type = other DNA
  modified_base 4: mod_base = OTHER; note = uracil
  modified_base 6..7: mod_base = OTHER; note = uracil
  modified_base 11: mod_base = OTHER; note = uracil
  modified_base 13: mod_base = OTHER; note = uracil
  modified_base 18..19: mod_base = OTHER; note = uracil
  modified_base 23: mod_base = OTHER; note = uracil
  modified_base 59: mod_base = OTHER; note = uracil
  modified_base 61: mod_base = OTHER; note = uracil
  modified_base 70..71: mod_base = OTHER; note = uracil
  modified_base 80: mod_base = OTHER; note = uracil
  modified_base 82: mod_base = OTHER; note = uracil
  modified_base 86: mod_base = OTHER; note = uracil
  modified_base 88..89: mod_base = OTHER; note = uracil
  modified_base 93..94: mod_base = OTHER; note = uracil
  modified_base 102..103: mod_base = OTHER; note = uracil
  modified_base 105..107: mod_base = OTHER; note = uracil
  modified_base 109..110: mod_base = OTHER; note = uracil
  modified_base 112: mod_base = OTHER; note = uracil
  modified_base 115..116: mod_base = OTHER; note = uracil
  modified_base 118..120: mod_base = OTHER; note = uracil
  modified_base 127: mod_base = OTHER; note = uracil
  modified_base 136: mod_base = OTHER; note = uracil
  modified_base 146: mod_base = OTHER; note = uracil
  modified_base 149: mod_base = OTHER; note = uracil
  modified_base 152: mod_base = OTHER; note = uracil
  modified_base 154..155: mod_base = OTHER; note = uracil
  modified_base 159..160: mod_base = OTHER; note = uracil
  modified_base 166: mod_base = OTHER; note = uracil
  modified_base 172: mod_base = OTHER; note = uracil
  modified_base 176: mod_base = OTHER; note = uracil
  modified_base 181: mod_base = OTHER; note = uracil
  modified_base 183: mod_base = OTHER; note = uracil
  modified_base 188..189: mod_base = OTHER; note = uracil
  modified_base 197: mod_base = OTHER; note = uracil
  modified_base 201: mod_base = OTHER; note = uracil
  modified_base 210..212: mod_base = OTHER; note = uracil
  modified_base 217: mod_base = OTHER; note = uracil
  modified_base 237..238: mod_base = OTHER; note = uracil
  modified_base 242: mod_base = OTHER; note = uracil
  modified_base 244: mod_base = OTHER; note = uracil
  modified_base 249: mod_base = OTHER; note = uracil
  modified_base 252..253: mod_base = OTHER; note = uracil
  modified_base 257..258: mod_base = OTHER; note = uracil
  modified_base 261..262: mod_base = OTHER; note = uracil
  modified_base 267: mod_base = OTHER; note = uracil
  modified_base 275..276: mod_base = OTHER; note = uracil
  modified_base 280..281: mod_base = OTHER; note = uracil
  modified_base 288..289: mod_base = OTHER; note = uracil
  modified_base 292: mod_base = OTHER; note = uracil
  modified_base 294: mod_base = OTHER; note = uracil
  modified_base 297..298: mod_base = OTHER; note = uracil
  modified_base 8: mod_base = m5c
  modified_base 16: mod_base = m5c
  modified_base 20: mod_base = m5c
  modified_base 51: mod_base = m5c
  modified_base 62: mod_base = m5c
  modified_base 156: mod_base = m5c
  variation 150: note = CpG site, residue is C if methylated or T(=U) if unmethylated
aggtattcgttataacgttcggttaatttttttgtattttttagtagagacggggttttatcgtgttagttaggatggttttagttttttgattttgtgatttatttattttagttttttaaagtgttgggattatagatgtgagttatygtattcggttaagtttatgatttttttgtattttgagttagtgttattggtaaagaatgttttgggtattgtggtgtggatggaagttaggtatattgtatttatttttttttagattaagttgtttggtttgtggatttttttagttag

SEQ ID NO: 486 - DNA, 300 bp, synthetic construct
  source 1..300: mol_type = other DNA
  modified_base 1: mod_base = OTHER; note = uracil
  modified_base 5: mod_base = OTHER; note = uracil
  modified_base 15..16: mod_base = OTHER; note = uracil
  modified_base 18: mod_base = OTHER; note = uracil
  modified_base 22..23: mod_base = OTHER; note = uracil
  modified_base 27: mod_base = OTHER; note = uracil
  modified_base 30: mod_base = OTHER; note = uracil
  modified_base 36: mod_base = OTHER; note = uracil
  modified_base 53: mod_base = OTHER; note = uracil
  modified_base 60..61: mod_base = OTHER; note = uracil
  modified_base 65: mod_base = OTHER; note = uracil
  modified_base 68..69: mod_base = OTHER; note = uracil
  modified_base 72..73: mod_base = OTHER; note = uracil
  modified_base 75: mod_base = OTHER; note = uracil
  modified_base 77..78: mod_base = OTHER; note = uracil
  modified_base 80: mod_base = OTHER; note = uracil
  modified_base 85..87: mod_base = OTHER; note = uracil
  modified_base 92: mod_base = OTHER; note = uracil
  modified_base 96: mod_base = OTHER; note = uracil
  modified_base 101..102: mod_base = OTHER; note = uracil
  modified_base 108: mod_base = OTHER; note = uracil
  modified_base 110: mod_base = OTHER; note = uracil
  modified_base 114: mod_base = OTHER; note = uracil
  modified_base 116: mod_base = OTHER; note = uracil
  modified_base 123: mod_base = OTHER; note = uracil
  modified_base 132: mod_base = OTHER; note = uracil
  modified_base 138: mod_base = OTHER; note = uracil
  modified_base 143: mod_base = OTHER; note = uracil
  modified_base 156: mod_base = OTHER; note = uracil
  modified_base 158: mod_base = OTHER; note = uracil
  modified_base 160: mod_base = OTHER; note = uracil
  modified_base 163: mod_base = OTHER; note = uracil
  modified_base 170..172: mod_base = OTHER; note = uracil
  modified_base 175: mod_base = OTHER; note = uracil
  modified_base 177: mod_base = OTHER; note = uracil
  modified_base 187: mod_base = OTHER; note = uracil
  modified_base 202: mod_base = OTHER; note = uracil
  modified_base 204: mod_base = OTHER; note = uracil
  modified_base 210: mod_base = OTHER; note = uracil
  modified_base 217: mod_base = OTHER; note = uracil
  modified_base 223..224: mod_base = OTHER; note = uracil
  modified_base 227..228: mod_base = OTHER; note = uracil
  modified_base 232: mod_base = OTHER; note = uracil
  modified_base 236: mod_base = OTHER; note = uracil
  modified_base 246..248: mod_base = OTHER; note = uracil
  modified_base 252: mod_base = OTHER; note = uracil
  modified_base 254: mod_base = OTHER; note = uracil
  modified_base 257: mod_base = OTHER; note = uracil
  modified_base 267: mod_base = OTHER; note = uracil
  modified_base 279: mod_base = OTHER; note = uracil
  modified_base 298..299: mod_base = OTHER; note = uracil
  modified_base 144: mod_base = m5c
  modified_base 238: mod_base = m5c
  modified_base 249: mod_base = m5c
  modified_base 280: mod_base = m5c
  modified_base 284: mod_base = m5c
  modified_base 292: mod_base = m5c
  variation 150: note = CpG site, residue is C if methylated or T(=U) if unmethylated
ttggttgagaaggtttataggttaggtaatttagtttaggaaggaatggatgtaatgtgtttggtttttatttatattataatgtttagggtattttttgttagtaatattggtttagagtatagaaagattatgaatttggtcgggtgyggtagtttatatttgtaattttagtattttgggaggttgaggtgggtggattataaggttaggagattgagattattttggttaatacggtgaaatttcgtttttattaaaaaatataaaaaaattagtcgggcgttgtgacgggtgttt

SEQ ID NO: 487 - DNA, 300 bp, synthetic construct
  source 1..300: mol_type = other DNA
  modified_base 3: mod_base = OTHER; note = uracil
  modified_base 14: mod_base = OTHER; note = uracil
  modified_base 17..18: mod_base = OTHER; note = uracil
  modified_base 26..29: mod_base = OTHER; note = uracil
  modified_base 31: mod_base = OTHER; note = uracil
  modified_base 35: mod_base = OTHER; note = uracil
  modified_base 38..41: mod_base = OTHER; note = uracil
  modified_base 49: mod_base = OTHER; note = uracil
  modified_base 51: mod_base = OTHER; note = uracil
  modified_base 55: mod_base = OTHER; note = uracil
  modified_base 58..59: mod_base = OTHER; note = uracil
  modified_base 61..63: mod_base = OTHER; note = uracil
  modified_base 65: mod_base = OTHER; note = uracil
  modified_base 67..68: mod_base = OTHER; note = uracil
  modified_base 70..71: mod_base = OTHER; note = uracil
  modified_base 77..81: mod_base = OTHER; note = uracil
  modified_base 84..88: mod_base = OTHER; note = uracil
  modified_base 91: mod_base = OTHER; note = uracil
  modified_base 96..97: mod_base = OTHER; note = uracil
  modified_base 99..100: mod_base = OTHER; note = uracil
  modified_base 104: mod_base = OTHER; note = uracil
  modified_base 107: mod_base = OTHER; note = uracil
  modified_base 110: mod_base = OTHER; note = uracil
  modified_base 118: mod_base = OTHER; note = uracil
  modified_base 132: mod_base = OTHER; note = uracil
  modified_base 136..137: mod_base = OTHER; note = uracil
  modified_base 143: mod_base = OTHER; note = uracil
  modified_base 148: mod_base = OTHER; note = uracil
  modified_base 151..152: mod_base = OTHER; note = uracil
  modified_base 157: mod_base = OTHER; note = uracil
  modified_base 159..160: mod_base = OTHER; note = uracil
  modified_base 165..166: mod_base = OTHER; note = uracil
  modified_base 170..171: mod_base = OTHER; note = uracil
  modified_base 175..176: mod_base = OTHER; note = uracil
  modified_base 178: mod_base = OTHER; note = uracil
  modified_base 181..182: mod_base = OTHER; note = uracil
  modified_base 188..190: mod_base = OTHER; note = uracil
  modified_base 200: mod_base = OTHER; note = uracil
  modified_base 204..205: mod_base = OTHER; note = uracil
  modified_base 212: mod_base = OTHER; note = uracil
  modified_base 216: mod_base = OTHER; note = uracil
  modified_base 223: mod_base = OTHER; note = uracil
  modified_base 228..230: mod_base = OTHER; note = uracil
  modified_base 234: mod_base = OTHER; note = uracil
  modified_base 240..241: mod_base = OTHER; note = uracil
  modified_base 252: mod_base = OTHER; note = uracil
  modified_base 258..259: mod_base = OTHER; note = uracil
  modified_base 265..266: mod_base = OTHER; note = uracil
  modified_base 268..270: mod_base = OTHER; note = uracil
  modified_base 272: mod_base = OTHER; note = uracil
  modified_base 277..278: mod_base = OTHER; note = uracil
  modified_base 280..284: mod_base = OTHER; note = uracil
  modified_base 288..291: mod_base = OTHER; note = uracil
  modified_base 294..295: mod_base = OTHER; note = uracil
  modified_base 297: mod_base = OTHER; note = uracil
  modified_base 4: mod_base = m5c
  modified_base 20: mod_base = m5c
  modified_base 53: mod_base = m5c
  modified_base 92: mod_base = m5c
  modified_base 113: mod_base = m5c
  modified_base 121: mod_base = m5c
  modified_base 161: mod_base = m5c
  modified_base 172: mod_base = m5c
  modified_base 217: mod_base = m5c
  modified_base 260: mod_base = m5c
  modified_base 285: mod_base = m5c
  variation 149: note = CpG site, residue is C if methylated or T(=U) if unmethylated
tttcgtggggatgtaatttcgtttgtttttttgatttttttatgagatttttcgtttttttttatattttttttattttttaattttttgtcggtttattaggttgtagttgcgggtttgcgggtaggggatatttttaggttttgatygttagagtattcggtttagtttcggttatagtttttggtttaagtgagggttggtttggggataagtcgaaattagggttttggttgtatttagaaagagaattgagattcgttgttttttattgggttatttttcgattttaattatata

SEQ ID NO: 488 - DNA, 300 bp, synthetic construct
  source 1..300: mol_type = other DNA
  modified_base 24..26: mod_base = OTHER; note = uracil
  modified_base 36: mod_base = OTHER; note = uracil
  modified_base 44: mod_base = OTHER; note = uracil
  modified_base 46: mod_base = OTHER; note = uracil
  modified_base 51: mod_base = OTHER; note = uracil
  modified_base 53: mod_base = OTHER; note = uracil
  modified_base 57: mod_base = OTHER; note = uracil
  modified_base 64: mod_base = OTHER; note = uracil
  modified_base 67..68: mod_base = OTHER; note = uracil
  modified_base 73..75: mod_base = OTHER; note = uracil
  modified_base 85: mod_base = OTHER; note = uracil
  modified_base 90..93: mod_base = OTHER; note = uracil
  modified_base 97..98: mod_base = OTHER; note = uracil
  modified_base 101..103: mod_base = OTHER; note = uracil
  modified_base 105: mod_base = OTHER; note = uracil
  modified_base 107: mod_base = OTHER; note = uracil
  modified_base 113..114: mod_base = OTHER; note = uracil
  modified_base 120: mod_base = OTHER; note = uracil
  modified_base 126: mod_base = OTHER; note = uracil
  modified_base 132: mod_base = OTHER; note = uracil
  modified_base 137: mod_base = OTHER; note = uracil
  modified_base 144: mod_base = OTHER; note = uracil
  modified_base 146: mod_base = OTHER; note = uracil
  modified_base 154: mod_base = OTHER; note = uracil
  modified_base 159..160: mod_base = OTHER; note = uracil
  modified_base 170..173: mod_base = OTHER; note = uracil
  modified_base 176..177: mod_base = OTHER; note = uracil
  modified_base 180: mod_base = OTHER; note = uracil
  modified_base 184..185: mod_base = OTHER; note = uracil
  modified_base 188: mod_base = OTHER; note = uracil
  modified_base 191: mod_base = OTHER; note = uracil
  modified_base 194: mod_base = OTHER; note = uracil
  modified_base 197..198: mod_base = OTHER; note = uracil
  modified_base 206: mod_base = OTHER; note = uracil
  modified_base 210: mod_base = OTHER; note = uracil
  modified_base 254: mod_base = OTHER; note = uracil
  modified_base 256: mod_base = OTHER; note = uracil
  modified_base 267: mod_base = OTHER; note = uracil
  modified_base 275: mod_base = OTHER; note = uracil
  modified_base 287: mod_base = OTHER; note = uracil
  modified_base 290..293: mod_base = OTHER; note = uracil
  modified_base 14: mod_base = m5c
  modified_base 39: mod_base = m5c
  modified_base 82: mod_base = m5c
  modified_base 127: mod_base = m5c
  modified_base 138: mod_base = m5c
  modified_base 178: mod_base = m5c
  modified_base 186: mod_base = m5c
  modified_base 207: mod_base = m5c
  modified_base 246: mod_base = m5c
  modified_base 279: mod_base = m5c
  modified_base 295: mod_base = m5c
  variation 150: note = CpG site, residue is C if methylated or T(=U) if unmethylated
atgtggttggggtcggggggtggtttagtgggaggtaacgggttttagttttttttttggatatagttagggttttgatttcggtttgtttttaggttagtttttatttgggttaaaggttgtggtcgggattggatcgggtgttttggyggttaagatttaggaatgttttttattcgtagattcgtagttgtagtttggtggatcggtagggggttgggggataaaggaggtgtgggaggaagcgagagattttatggggaagttagaggggtaaacgaggttgtatttttacggaat

SEQ ID NO: 489 - DNA, 300 bp, synthetic construct
  source 1..300: mol_type = other DNA
  modified_base 1: mod_base = OTHER; note = uracil
  modified_base 7..8: mod_base = OTHER; note = uracil
  modified_base 13..14: mod_base = OTHER; note = uracil
  modified_base 18..21: mod_base = OTHER; note = uracil
  modified_base 23..24: mod_base = OTHER; note = uracil
  modified_base 29: mod_base = OTHER; note = uracil
  modified_base 33..34: mod_base = OTHER; note = uracil
  modified_base 38..39: mod_base = OTHER; note = uracil
  modified_base 44: mod_base = OTHER; note = uracil
  modified_base 46..47: mod_base = OTHER; note = uracil
  modified_base 56..58: mod_base = OTHER; note = uracil
  modified_base 61..62: mod_base = OTHER; note = uracil
  modified_base 65: mod_base = OTHER; note = uracil
  modified_base 67: mod_base = OTHER; note = uracil
  modified_base 70: mod_base = OTHER; note = uracil
  modified_base 72: mod_base = OTHER; note = uracil
  modified_base 77: mod_base = OTHER; note = uracil
  modified_base 82..84: mod_base = OTHER; note = uracil
  modified_base 88..89: mod_base = OTHER; note = uracil
  modified_base 92: mod_base = OTHER; note = uracil
  modified_base 95..96: mod_base = OTHER; note = uracil
  modified_base 99: mod_base = OTHER; note = uracil
  modified_base 105: mod_base = OTHER; note = uracil
  modified_base 113..115: mod_base = OTHER; note = uracil
  modified_base 123..124: mod_base = OTHER; note = uracil
  modified_base 129..133: mod_base = OTHER; note = uracil
  modified_base 136..138: mod_base = OTHER; note = uracil
  modified_base 141..142: mod_base = OTHER; note = uracil
  modified_base 147..148: mod_base = OTHER; note = uracil
  modified_base 156: mod_base = OTHER; note = uracil
  modified_base 159..160: mod_base = OTHER; note = uracil
  modified_base 162: mod_base = OTHER; note = uracil
  modified_base 167: mod_base = OTHER; note = uracil
  modified_base 173: mod_base = OTHER; note = uracil
  modified_base 179..181: mod_base = OTHER; note = uracil
  modified_base 183: mod_base = OTHER; note = uracil
  modified_base 190: mod_base = OTHER; note = uracil
  modified_base 194: mod_base = OTHER; note = uracil
  modified_base 198..199: mod_base = OTHER; note = uracil
  modified_base 203..204: mod_base = OTHER; note = uracil
  modified_base 210: mod_base = OTHER; note = uracil
  modified_base 212: mod_base = OTHER; note = uracil
  modified_base 220..222: mod_base = OTHER; note = uracil
  modified_base 224..226: mod_base = OTHER; note = uracil
  modified_base 230..231: mod_base = OTHER; note = uracil
  modified_base 234: mod_base = OTHER; note = uracil
  modified_base 236..237: mod_base = OTHER; note = uracil
  modified_base 242: mod_base = OTHER; note = uracil
  modified_base 251: mod_base = OTHER; note = uracil
  modified_base 255..258: mod_base = OTHER; note = uracil
  modified_base 264..269: mod_base = OTHER; note = uracil
  modified_base 272: mod_base = OTHER; note = uracil
  modified_base 277: mod_base = OTHER; note = uracil
  modified_base 282..283: mod_base = OTHER; note = uracil
  modified_base 297: mod_base = OTHER; note = uracil
  modified_base 300: mod_base = OTHER; note = uracil
  modified_base 9: mod_base = m5c
  modified_base 16: mod_base = m5c
  modified_base 27: mod_base = m5c
  modified_base 30: mod_base = m5c
  modified_base 36: mod_base = m5c
  modified_base 40: mod_base = m5c
  modified_base 42: mod_base = m5c
  modified_base 63: mod_base = m5c
  modified_base 68: mod_base = m5c
  modified_base 74: mod_base = m5c
  modified_base 78: mod_base = m5c
  modified_base 102: mod_base = m5c
  modified_base 106: mod_base = m5c
  modified_base 109: mod_base = m5c
  modified_base 125: mod_base = m5c
  modified_base 143: mod_base = m5c
  modified_base 171: mod_base = m5c
  modified_base 200: mod_base = m5c
  modified_base 213: mod_base = m5c
  modified_base 215: mod_base = m5c
  modified_base 227: mod_base = m5c
  modified_base 232: mod_base = m5c
  modified_base 240: mod_base = m5c
  modified_base 247: mod_base = m5c
  modified_base 260: mod_base = m5c
  modified_base 262: mod_base = m5c
  modified_base 284: mod_base = m5c
  variation 150: note = CpG site, residue is C if methylated or T(=U) if unmethylated
tttatattcggttttcgtttttttagcgtcggtttcgttcgcgtttttgagaaagttttgttcgtttcgtttacggtcgtgttttggttaattttttgttgcggtcggcgggttttgggaagttcgtgtttttttttttgttcgggtttygaggatttttttttggtaggcgttggggttttttgagagtaggtaggttcggtttttgttttcgcgaggtttatttcggttcgtattttcgttttgcggtttgattttacgcgtttttttgtagggttgggttcgggtgaggggagtttt

SEQ ID NO: 490 - DNA, 300 bp, synthetic construct
  source 1..300: mol_type = other DNA
  modified_base 5: mod_base = OTHER; note = uracil
  modified_base 7..10: mod_base = OTHER; note = uracil
  modified_base 12: mod_base = OTHER; note = uracil
  modified_base 14..15: mod_base = OTHER; note = uracil
  modified_base 20..22: mod_base = OTHER; note = uracil
  modified_base 25..27: mod_base = OTHER; note = uracil
  modified_base 30: mod_base = OTHER; note = uracil
  modified_base 48: mod_base = OTHER; note = uracil
  modified_base 52: mod_base = OTHER; note = uracil
  modified_base 55: mod_base = OTHER; note = uracil
  modified_base 72: mod_base = OTHER; note = uracil
  modified_base 82..83: mod_base = OTHER; note = uracil
  modified_base 93: mod_base = OTHER; note = uracil
  modified_base 99: mod_base = OTHER; note = uracil
  modified_base 104..105: mod_base = OTHER; note = uracil
  modified_base 108..109: mod_base = OTHER; note = uracil
  modified_base 112: mod_base = OTHER; note = uracil
  modified_base 114: mod_base = OTHER; note = uracil
  modified_base 116: mod_base = OTHER; note = uracil
  modified_base 123..126: mod_base = OTHER; note = uracil
  modified_base 131..132: mod_base = OTHER; note = uracil
  modified_base 135..136: mod_base = OTHER; note = uracil
  modified_base 147..148: mod_base = OTHER; note = uracil
  modified_base 155..156: mod_base = OTHER; note = uracil
  modified_base 161: mod_base = OTHER; note = uracil
  modified_base 173: mod_base = OTHER; note = uracil
  modified_base 179: mod_base = OTHER; note = uracil
  modified_base 182..184: mod_base = OTHER; note = uracil
  modified_base 189..190: mod_base = OTHER; note = uracil
  modified_base 193: mod_base = OTHER; note = uracil
  modified_base 197: mod_base = OTHER; note = uracil
  modified_base 200: mod_base = OTHER; note = uracil
  modified_base 203: mod_base = OTHER; note = uracil
  modified_base 214..215: mod_base = OTHER; note = uracil
  modified_base 220: mod_base = OTHER; note = uracil
  modified_base 225: mod_base = OTHER; note = uracil
  modified_base 241: mod_base = OTHER; note = uracil
  modified_base 246: mod_base = OTHER; note = uracil
  modified_base 250: mod_base = OTHER; note = uracil
  modified_base 252: mod_base = OTHER; note = uracil
  modified_base 269: mod_base = OTHER; note = uracil
  modified_base 275: mod_base = OTHER; note = uracil
  modified_base 290: mod_base = OTHER; note = uracil
  modified_base 16: mod_base = m5c
  modified_base 38: mod_base = m5c
  modified_base 40: mod_base = m5c
  modified_base 53: mod_base = m5c
  modified_base 60: mod_base = m5c
  modified_base 68: mod_base = m5c
  modified_base 73: mod_base = m5c
  modified_base 85: mod_base = m5c
  modified_base 87: mod_base = m5c
  modified_base 100: mod_base = m5c
  modified_base 129: mod_base = m5c
  modified_base 157: mod_base = m5c
  modified_base 175: mod_base = m5c
  modified_base 191: mod_base = m5c
  modified_base 194: mod_base = m5c
  modified_base 198: mod_base = m5c
  modified_base 222: mod_base = m5c
  modified_base 226: mod_base = m5c
  modified_base 232: mod_base = m5c
  modified_base 237: mod_base = m5c
  modified_base 258: mod_base = m5c
  modified_base 260: mod_base = m5c
  modified_base 264: mod_base = m5c
  modified_base 270: mod_base = m5c
  modified_base 273: mod_base = m5c
  modified_base 284: mod_base = m5c
  modified_base 291: mod_base = m5c
  variation 150: note = CpG site, residue is C if methylated or T(=U) if unmethylated
gaagttttttttattcgggtttagttttgtaggggggcgcgtggggttagatcgtaaagcgaaggtgcgggtcggggtgggtttcgcggagataaaggtcgggtttgtttgtttttagagggttttagcgtttgttaagaggaagttttygaggttcgggtagggaagggggtacgggttttttagggttcgtcggtcgtagtaggaagttggttagggtacggtcgtgagcggagcgggtagggtttttttaggagcgcgggcgaggtcggcgttggaggggcgaggatcgggtataag

SEQ ID NO: 491 - DNA, 300 bp, synthetic construct
  source 1..300: mol_type = other DNA
  modified_base 3: mod_base = OTHER; note = uracil
  modified_base 5..6: mod_base = OTHER; note = uracil
  modified_base 12: mod_base = OTHER; note = uracil
  modified_base 21: mod_base = OTHER; note = uracil
  modified_base 24: mod_base = OTHER; note = uracil
  modified_base 27: mod_base = OTHER; note = uracil
  modified_base 32..33: mod_base = OTHER; note = uracil
  modified_base 52: mod_base = OTHER; note = uracil
  modified_base 77..78: mod_base = OTHER; note = uracil
  modified_base 84: mod_base = OTHER; note = uracil
  modified_base 86: mod_base = OTHER; note = uracil
  modified_base 92..93: mod_base = OTHER; note = uracil
  modified_base 95: mod_base = OTHER; note = uracil
  modified_base 100: mod_base = OTHER; note = uracil
  modified_base 104..106: mod_base = OTHER; note = uracil
  modified_base 109..110: mod_base = OTHER; note = uracil
  modified_base 115: mod_base = OTHER; note = uracil
  modified_base 118..119: mod_base = OTHER; note = uracil
  modified_base 123: mod_base = OTHER; note = uracil
  modified_base 129: mod_base = OTHER; note = uracil
  modified_base 131: mod_base = OTHER; note = uracil
  modified_base 134: mod_base = OTHER; note = uracil
  modified_base 139: mod_base = OTHER; note = uracil
  modified_base 142: mod_base = OTHER; note = uracil
  modified_base 145..147: mod_base = OTHER; note = uracil
  modified_base 152..155: mod_base = OTHER; note = uracil
  modified_base 157: mod_base = OTHER; note = uracil
  modified_base 161: mod_base = OTHER; note = uracil
  modified_base 163..164: mod_base = OTHER; note = uracil
  modified_base 169..170: mod_base = OTHER; note = uracil
  modified_base 200..201: mod_base = OTHER; note = uracil
  modified_base 206..207: mod_base = OTHER; note = uracil
  modified_base 230: mod_base = OTHER; note = uracil
  modified_base 234..235: mod_base = OTHER; note = uracil
  modified_base 242: mod_base = OTHER; note = uracil
  modified_base 244..246: mod_base = OTHER; note = uracil
  modified_base 260..262: mod_base = OTHER; note = uracil
  modified_base 273..274: mod_base = OTHER; note = uracil
  modified_base 277: mod_base = OTHER; note = uracil
  modified_base 292: mod_base = OTHER; note = uracil
  modified_base 296: mod_base = OTHER; note = uracil
  modified_base 25: mod_base = m5c
  modified_base 34: mod_base = m5c
  modified_base 36: mod_base = m5c
  modified_base 42: mod_base = m5c
  modified_base 44: mod_base = m5c
  modified_base 55: mod_base = m5c
  modified_base 66: mod_base = m5c
  modified_base 70: mod_base = m5c
  modified_base 73: mod_base = m5c
  modified_base 79: mod_base = m5c
  modified_base 87: mod_base = m5c
  modified_base 89: mod_base = m5c
  modified_base 107: mod_base = m5c
  modified_base 116: mod_base = m5c
  modified_base 124: mod_base = m5c
  modified_base 126: mod_base = m5c
  modified_base 132: mod_base = m5c
  modified_base 137: mod_base = m5c
  modified_base 140: mod_base = m5c
  modified_base 148: mod_base = m5c
  modified_base 171: mod_base = m5c
  modified_base 175: mod_base = m5c
  modified_base 177: mod_base = m5c
  modified_base 188: mod_base = m5c
  modified_base 191: mod_base = m5c
  modified_base 196: mod_base = m5c
  modified_base 198: mod_base = m5c
  modified_base 208: mod_base = m5c
  modified_base 210: mod_base = m5c
  modified_base 212: mod_base = m5c
  modified_base 218: mod_base = m5c
  modified_base 222: mod_base = m5c
  modified_base 224: mod_base = m5c
  modified_base 251: mod_base = m5c
  modified_base 267: mod_base = m5c
  modified_base 285: mod_base = m5c
  modified_base 293: mod_base = m5c
  variation 150: note = CpG site, residue is C if methylated or T(=U) if unmethylated
agtttttttattagaaagggtagtcgtagagttcgcgtgtgcgcgatgtggttgcgggtggggagcgggcggcgggttcgggatatcgcggttattgttttagtttcgtttgggtcgtttgatcgcggtttcgttgcgtcgtagtttcgygtttttttggtttttgttttcgggcgcggggagaaggcggcggggcgcgtttgggttcgcgcgggtgcgaacgcgaggttttttttgggtgtttttaggtcggaggatttttagggcgggggttattagggtggcgaggaatcggtaggg

SEQ ID NO: 492 - DNA, 300 bp, synthetic construct
  source 1..300: mol_type = other DNA
  modified_base 1..3: mod_base = OTHER; note = uracil
  modified_base 6: mod_base = OTHER; note = uracil
  modified_base 12..13: mod_base = OTHER; note = uracil
  modified_base 17..18: mod_base = OTHER; note = uracil
  modified_base 20..22: mod_base = OTHER; note = uracil
  modified_base 29..32: mod_base = OTHER; note = uracil
  modified_base 35..37: mod_base = OTHER; note = uracil
  modified_base 45..46: mod_base = OTHER; note = uracil
  modified_base 48: mod_base = OTHER; note = uracil
  modified_base 52..53: mod_base = OTHER; note = uracil
  modified_base 60: mod_base = OTHER; note = uracil
  modified_base 62..64: mod_base = OTHER; note = uracil
  modified_base 73..74: mod_base = OTHER; note = uracil
  modified_base 84: mod_base = OTHER; note = uracil
  modified_base 86..87: mod_base = OTHER; note = uracil
  modified_base 96..98: mod_base = OTHER; note = uracil
  modified_base 106..108: mod_base = OTHER; note = uracil
  modified_base 111: mod_base = OTHER; note = uracil
  modified_base 114..115: mod_base = OTHER; note = uracil
  modified_base 118: mod_base = OTHER; note = uracil
  modified_base 120..122: mod_base = OTHER; note = uracil
  modified_base 127..128: mod_base = OTHER; note = uracil
  modified_base 135: mod_base = OTHER; note = uracil
  modified_base 141..142: mod_base = OTHER; note = uracil
  modified_base 157: mod_base = OTHER; note = uracil
  modified_base 165: mod_base = OTHER; note = uracil
  modified_base 173: mod_base = OTHER; note = uracil
  modified_base 180: mod_base = OTHER; note = uracil
  modified_base 187..189: mod_base = OTHER; note = uracil
  modified_base 198: mod_base = OTHER; note = uracil
  modified_base 204: mod_base = OTHER; note = uracil
  modified_base 210: mod_base = OTHER; note = uracil
  modified_base 219..220: mod_base = OTHER; note = uracil
  modified_base 225..226: mod_base = OTHER; note = uracil
  modified_base 229: mod_base = OTHER; note = uracil
  modified_base 232..233: mod_base = OTHER; note = uracil
  modified_base 236: mod_base = OTHER; note = uracil
  modified_base 238..241: mod_base = OTHER; note = uracil
  modified_base 243..244: mod_base = OTHER; note = uracil
  modified_base 247: mod_base = OTHER; note = uracil
  modified_base 250..251: mod_base = OTHER; note = uracil
  modified_base 253: mod_base = OTHER; note = uracil
  modified_base 260: mod_base = OTHER; note = uracil
  modified_base 262: mod_base = OTHER; note = uracil
  modified_base 270: mod_base = OTHER; note = uracil
  modified_base 272: mod_base = OTHER; note = uracil
  modified_base 278: mod_base = OTHER; note = uracil
  modified_base 281..283: mod_base = OTHER; note = uracil
  modified_base 287: mod_base = OTHER; note = uracil
  modified_base 299: mod_base = OTHER; note = uracil
  modified_base 7: mod_base = m5c
  modified_base 15: mod_base = m5c
  modified_base 33: mod_base = m5c
  modified_base 49: mod_base = m5c
  modified_base 76: mod_base = m5c
  modified_base 78: mod_base = m5c
  modified_base 82: mod_base = m5c
  modified_base 88: mod_base = m5c
  modified_base 90: mod_base = m5c
  modified_base 92: mod_base = m5c
  modified_base 102: mod_base = m5c
  modified_base 104: mod_base = m5c
  modified_base 109: mod_base = m5c
  modified_base 112: mod_base = m5c
  modified_base 123: mod_base = m5c
  modified_base 125: mod_base = m5c
  modified_base 129: mod_base = m5c
  modified_base 152: mod_base = m5c
  modified_base 160: mod_base = m5c
  modified_base 163: mod_base = m5c
  modified_base 168: mod_base = m5c
  modified_base 174: mod_base = m5c
  modified_base 176: mod_base = m5c
  modified_base 184: mod_base = m5c
  modified_base 193: mod_base = m5c
  modified_base 211: mod_base = m5c
  modified_base 213: mod_base = m5c
  modified_base 221: mod_base = m5c
  modified_base 227: mod_base = m5c
  modified_base 230: mod_base = m5c
  modified_base 234: mod_base = m5c
  modified_base 245: mod_base = m5c
  modified_base 256: mod_base = m5c
  modified_base 258: mod_base = m5c
  modified_base 264: mod_base = m5c
  modified_base 266: mod_base = m5c
  modified_base 275: mod_base = m5c
  variation 150: note = CpG site, residue is C if methylated or T(=U) if unmethylated
ttttgtcggtttttcgttattttgatggttttcgttttgggaatttttcgatttgggagtatttaggaaagatttcgcgttcgtattcgcgcgggtttaggcgcgtttcgtcgtttttttttcgcgttcgggaataggagttagaggggygcggggttgcggcgtagcggagtcgcggttaggcggtttaggcggggttagaatagtggtcgcggtgtttcgggttcgtcgttcgttttttattcgtagttatatcgcgtatacgcgggttttgcggttgttttttttgataaaggagtt

SEQ ID NO: 493 - DNA, 300 bp, synthetic construct
  source 1..300: mol_type = other DNA
  modified_base 9..10: mod_base = OTHER; note = uracil
  modified_base 13: mod_base = OTHER; note = uracil
  modified_base 18: mod_base = OTHER; note = uracil
  modified_base 22: mod_base = OTHER; note = uracil
  modified_base 28: mod_base = OTHER; note = uracil
  modified_base 31: mod_base = OTHER; note = uracil
  modified_base 34: mod_base = OTHER; note = uracil
  modified_base 38: mod_base = OTHER; note = uracil
  modified_base 40: mod_base = OTHER; note = uracil
  modified_base 60..61: mod_base = OTHER; note = uracil
  modified_base 73: mod_base = OTHER; note = uracil
  modified_base 81: mod_base = OTHER; note = uracil
  modified_base 83: mod_base = OTHER; note = uracil
  modified_base 86: mod_base = OTHER; note = uracil
  modified_base 94: mod_base = OTHER; note = uracil
  modified_base 100..104: mod_base = OTHER; note = uracil
  modified_base 107: mod_base = OTHER; note = uracil
  modified_base 114: mod_base = OTHER; note = uracil
  modified_base 127: mod_base = OTHER; note = uracil
  modified_base 131: mod_base = OTHER; note = uracil
  modified_base 137..140: mod_base = OTHER; note = uracil
  modified_base 142: mod_base = OTHER; note = uracil
  modified_base 149: mod_base = OTHER; note = uracil
  modified_base 164..165: mod_base = OTHER; note = uracil
  modified_base 168..170: mod_base = OTHER; note = uracil
  modified_base 175: mod_base = OTHER; note = uracil
  modified_base 180: mod_base = OTHER; note = uracil
  modified_base 187: mod_base = OTHER; note = uracil
  modified_base 189..190: mod_base = OTHER; note = uracil
  modified_base 192: mod_base = OTHER; note = uracil
  modified_base 197: mod_base = OTHER; note = uracil
  modified_base 208: mod_base = OTHER; note = uracil
  modified_base 214: mod_base = OTHER; note = uracil
  modified_base 235: mod_base = OTHER; note = uracil
  modified_base 237: mod_base = OTHER; note = uracil
  modified_base 246..247: mod_base = OTHER; note = uracil
  modified_base 253: mod_base = OTHER; note = uracil
  modified_base 256: mod_base = OTHER; note = uracil
  modified_base 259: mod_base = OTHER; note = uracil
  modified_base 265: mod_base = OTHER; note = uracil
  modified_base 267: mod_base = OTHER; note = uracil
  modified_base 269: mod_base = OTHER; note = uracil
  modified_base 279: mod_base = OTHER; note = uracil
  modified_base 283: mod_base = OTHER; note = uracil
  modified_base 291: mod_base = OTHER; note = uracil
  modified_base 300: mod_base = OTHER; note = uracil
  modified_base 26: mod_base = m5c
  modified_base 35: mod_base = m5c
  modified_base 128: mod_base = m5c
  modified_base 231: mod_base = m5c
  modified_base 248: mod_base = m5c
  variation 151: note = CpG site, residue is C if methylated or T(=U) if unmethylated
tggaaaagttaattgtgtaaatattcgtttttatcgttataaggtgaaaaggaaaaatgttaaaaaggagagtttggaaatatagtagaagagtaatgattttttgtagagaatatgaaataagattcggtagtgattttattaaagatayggaaaataaggtttaatttagaattggttagagaatattattgtgttttagagtaataattataaaggaaaagagggatcgggtattgtaatatttcgggattgtagtttgtattttttgggtggtgtattttgtaatttaattaaatt

SEQ ID NO: 494 - DNA, 300 bp, synthetic construct
  source 1..300: mol_type = other DNA
  modified_base 16: mod_base = OTHER; note = uracil
  modified_base 23: mod_base = OTHER; note = uracil
  modified_base 25..26: mod_base = OTHER; note = uracil
  modified_base 28..30: mod_base = OTHER; note = uracil
  modified_base 39: mod_base = OTHER; note = uracil
  modified_base 43: mod_base = OTHER; note = uracil
  modified_base 46: mod_base = OTHER; note = uracil
  modified_base 50..51: mod_base = OTHER; note = uracil
  modified_base 62: mod_base = OTHER; note = uracil
  modified_base 67..68: mod_base = OTHER; note = uracil
  modified_base 73..75: mod_base = OTHER; note = uracil
  modified_base 77: mod_base = OTHER; note = uracil
  modified_base 82..83: mod_base = OTHER; note = uracil
  modified_base 97: mod_base = OTHER; note = uracil
  modified_base 99: mod_base = OTHER; note = uracil
  modified_base 105: mod_base = OTHER; note = uracil
  modified_base 107: mod_base = OTHER; note = uracil
  modified_base 117: mod_base = OTHER; note = uracil
  modified_base 119: mod_base = OTHER; note = uracil
  modified_base 123..124: mod_base = OTHER; note = uracil
  modified_base 129: mod_base = OTHER; note = uracil
  modified_base 139..140: mod_base = OTHER; note = uracil
  modified_base 148: mod_base = OTHER; note = uracil
  modified_base 154: mod_base = OTHER; note = uracil
  modified_base 166: mod_base = OTHER; note = uracil
  modified_base 168: mod_base = OTHER; note = uracil
  modified_base 171: mod_base = OTHER; note = uracil
  modified_base 177: mod_base = OTHER; note = uracil
  modified_base 184: mod_base = OTHER; note = uracil
  modified_base 190: mod_base = OTHER; note = uracil
  modified_base 192: mod_base = OTHER; note = uracil
  modified_base 195: mod_base = OTHER; note = uracil
  modified_base 203: mod_base = OTHER; note = uracil
  modified_base 208: mod_base = OTHER; note = uracil
  modified_base 210: mod_base = OTHER; note = uracil
  modified_base 213: mod_base = OTHER; note = uracil
  modified_base 216: mod_base = OTHER; note = uracil
  modified_base 224..225: mod_base = OTHER; note = uracil
  modified_base 229: mod_base = OTHER; note = uracil
  modified_base 231: mod_base = OTHER; note = uracil
  modified_base 233..234: mod_base = OTHER; note = uracil
  modified_base 242: mod_base = OTHER; note = uracil
  modified_base 249..250: mod_base = OTHER; note = uracil
  modified_base 255: mod_base = OTHER; note = uracil
  modified_base 257..258: mod_base = OTHER; note = uracil
  modified_base 284: mod_base = OTHER; note = uracil
  modified_base 286: mod_base = OTHER; note = uracil
  modified_base 293: mod_base = OTHER; note = uracil
  modified_base 298..299: mod_base = OTHER; note = uracil
  modified_base 52: mod_base = m5c
  modified_base 69: mod_base = m5c
  modified_base 172: mod_base = m5c
  modified_base 265: mod_base = m5c
  modified_base 274: mod_base = m5c
  variation 149: note = CpG site, residue is C if methylated or T(=U) if unmethylated
gatttaattgaattatagaatgtattatttagagagtataagttgtagtttcgggatattatagtgttcgatttttttttttttttgtaattgttattttaaagtatagtggtgttttttgattagttttgggttggattttatttttygtgtttttagtggggttattgtcggattttattttatgttttttgtagggggttattgtttttttgttgtgtttttaagtttttttttttggtattttttttttttattttgtgacggtagaagcgaatgtttgtatagttggttttttta

SEQ ID NO: 495 - DNA, 300 bp, synthetic construct
  source 1..300: mol_type = other DNA
  modified_base 1: mod_base = OTHER; note = uracil
  modified_base 4: mod_base = OTHER; note = uracil
  modified_base 12: mod_base = OTHER; note = uracil
  modified_base 14: mod_base = OTHER; note = uracil
  modified_base 22: mod_base = OTHER; note = uracil
  modified_base 24: mod_base = OTHER; note = uracil
  modified_base 28: mod_base = OTHER; note = uracil
  modified_base 32..34: mod_base = OTHER; note = uracil
  modified_base 46: mod_base = OTHER; note = uracil
  modified_base 52: mod_base = OTHER; note = uracil
  modified_base 58: mod_base = OTHER; note = uracil
  modified_base 66: mod_base = OTHER; note = uracil
  modified_base 73: mod_base = OTHER; note = uracil
  modified_base 79: mod_base = OTHER; note = uracil
  modified_base 82: mod_base = OTHER; note = uracil
  modified_base 87: mod_base = OTHER; note = uracil
  modified_base 98: mod_base = OTHER; note = uracil
  modified_base 101: mod_base = OTHER; note = uracil
  modified_base 105..107: mod_base = OTHER; note = uracil
  modified_base 109: mod_base = OTHER; note = uracil
  modified_base 113: mod_base = OTHER; note = uracil
  modified_base 119..120: mod_base = OTHER; note = uracil
  modified_base 123: mod_base = OTHER; note = uracil
  modified_base 135: mod_base = OTHER; note = uracil
  modified_base 142: mod_base = OTHER; note = uracil
  modified_base 144: mod_base = OTHER; note = uracil
  modified_base 148: mod_base = OTHER; note = uracil
  modified_base 153: mod_base = OTHER; note = uracil
  modified_base 155..157: mod_base = OTHER; note = uracil
  modified_base 164..165: mod_base = OTHER; note = uracil
  modified_base 167: mod_base = OTHER; note = uracil
  modified_base 169..170: mod_base = OTHER; note = uracil
  modified_base 174: mod_base = OTHER; note = uracil
  modified_base 176..177: mod_base = OTHER; note = uracil
  modified_base 182: mod_base = OTHER; note = uracil
  modified_base 188: mod_base = OTHER; note = uracil
  modified_base 192: mod_base = OTHER; note = uracil
  modified_base 201..202: mod_base = OTHER; note = uracil
  modified_base 211: mod_base = OTHER; note = uracil
  modified_base 220: mod_base = OTHER; note = uracil
  modified_base 223..224: mod_base = OTHER; note = uracil
  modified_base 233..237: mod_base = OTHER; note = uracil
  modified_base 243: mod_base = OTHER; note = uracil
  modified_base 245: mod_base = OTHER; note = uracil
  modified_base 247..248: mod_base = OTHER; note = uracil
  modified_base 252: mod_base = OTHER; note = uracil
  modified_base 260..261: mod_base = OTHER; note = uracil
  modified_base 267: mod_base = OTHER; note = uracil
  modified_base 270: mod_base = OTHER; note = uracil
  modified_base 273..275: mod_base = OTHER; note = uracil
  modified_base 277: mod_base = OTHER; note = uracil
  modified_base 279: mod_base = OTHER; note = uracil
  modified_base 285..287: mod_base = OTHER; note = uracil
  modified_base 293..295: mod_base = OTHER; note = uracil
  modified_base 67: mod_base = m5c
  modified_base 114: mod_base = m5c
  modified_base 126: mod_base = m5c
  modified_base 161: mod_base = m5c
  modified_base 203: mod_base = m5c
  modified_base 226: mod_base = m5c
  modified_base 280: mod_base = m5c
  variation 150: note = CpG site, residue is C if methylated or T(=U) if unmethylated
ttgtagattgatattgttaattataaataagtttagggttgtgtttagagataaagttagtgtgatcggtgattgttatagtaatataaaataatggtagtagttttattagtcgaggttagtatcgaatagggtaagttatttaaataygttattttagcgattattttaaatatttgtgtttaaattaatttagggagttcggttttgtaggatgtgtaattacgttgtgttttttagggtttattagattttagtatttaatgtagttatttttatcgtggtttaggtttttaggga

SEQ ID NO: 496 - DNA, 300 bp, synthetic construct
  source 1..300: mol_type = other DNA
  modified_base 1..3: mod_base = OTHER; note = uracil
  modified_base 10..11: mod_base = OTHER; note = uracil
  modified_base 16..17: mod_base = OTHER; note = uracil
  modified_base 31: mod_base = OTHER; note = uracil
  modified_base 34: mod_base = OTHER; note = uracil
  modified_base 43: mod_base = OTHER; note = uracil
  modified_base 50: mod_base = OTHER; note = uracil
  modified_base 58..60: mod_base = OTHER; note = uracil
  modified_base 68: mod_base = OTHER; note = uracil
  modified_base 70: mod_base = OTHER; note = uracil
  modified_base 81: mod_base = OTHER; note = uracil
  modified_base 83: mod_base = OTHER; note = uracil
  modified_base 86..87: mod_base = OTHER; note = uracil
  modified_base 90: mod_base = OTHER; note = uracil
  modified_base 95: mod_base = OTHER; note = uracil
  modified_base 100: mod_base = OTHER; note = uracil
  modified_base 102..104: mod_base = OTHER; note = uracil
  modified_base 119: mod_base = OTHER; note = uracil
  modified_base 121: mod_base = OTHER; note = uracil
  modified_base 140: mod_base = OTHER; note = uracil
  modified_base 162: mod_base = OTHER; note = uracil
  modified_base 166..168: mod_base = OTHER; note = uracil
  modified_base 178: mod_base = OTHER; note = uracil
  modified_base 182..183: mod_base = OTHER; note = uracil
  modified_base 188: mod_base = OTHER; note = uracil
  modified_base 197: mod_base = OTHER; note = uracil
  modified_base 200: mod_base = OTHER; note = uracil
  modified_base 203..204: mod_base = OTHER; note = uracil
  modified_base 219: mod_base = OTHER; note = uracil
  modified_base 225: mod_base = OTHER; note = uracil
  modified_base 229: mod_base = OTHER; note = uracil
  modified_base 231: mod_base = OTHER; note = uracil
  modified_base 236: mod_base = OTHER; note = uracil
  modified_base 238: mod_base = OTHER; note = uracil
  modified_base 240: mod_base = OTHER; note = uracil
  modified_base 244: mod_base = OTHER; note = uracil
  modified_base 250: mod_base = OTHER; note = uracil
  modified_base 252: mod_base = OTHER; note = uracil
  modified_base 257: mod_base = OTHER; note = uracil
  modified_base 259: mod_base = OTHER; note = uracil
  modified_base 262..264: mod_base = OTHER; note = uracil
  modified_base 269: mod_base = OTHER; note = uracil
  modified_base 284: mod_base = OTHER; note = uracil
  modified_base 290: mod_base = OTHER; note = uracil
  modified_base 294: mod_base = OTHER; note = uracil
  modified_base 297: mod_base = OTHER; note = uracil
  modified_base 19: mod_base = m5c
  modified_base 73: mod_base = m5c
  modified_base 96: mod_base = m5c
  modified_base 138: mod_base = m5c
  modified_base 173: mod_base = m5c
  modified_base 185: mod_base = m5c
  modified_base 232: mod_base = m5c
  variation 149: note = CpG site, residue is C if methylated or T(=U) if unmethylated
ttttgggaatttgggttacggtgagggtagttgtattaggtattaaagtttggtgagttttagggggtataacgtggttgtatattttgtaaaatcgggttttttaagttagtttaagtataggtgtttggagtggtcgttagggtgaygtgtttgagtaatttgttttattcgatgttggtttcggttagtgggattgttgttattattttgtattgttgtaatagttatcggttatattgattttgtttttgaatataattttgggtttgtttgtgattaatagtgttaatttgtagg

SEQ ID NO: 497 - DNA, 300 bp, synthetic construct
  source 1..300: mol_type = other DNA
  modified_base 4: mod_base = OTHER; note = uracil
  modified_base 6: mod_base = OTHER; note = uracil
  modified_base 9..10: mod_base = OTHER; note = uracil
  modified_base 14: mod_base = OTHER; note = uracil
  modified_base 19: mod_base = OTHER; note = uracil
  modified_base 23..24: mod_base = OTHER; note = uracil
  modified_base 26: mod_base = OTHER; note = uracil
  modified_base 30..31: mod_base = OTHER; note = uracil
  modified_base 33: mod_base = OTHER; note = uracil
  modified_base 39: mod_base = OTHER; note = uracil
  modified_base 42..46: mod_base = OTHER; note = uracil
  modified_base 49..51: mod_base = OTHER; note = uracil
  modified_base 56: mod_base = OTHER; note = uracil
  modified_base 58..59: mod_base = OTHER; note = uracil
  modified_base 64..65: mod_base = OTHER; note = uracil
  modified_base 70..72: mod_base = OTHER; note = uracil
  modified_base 74: mod_base = OTHER; note = uracil
  modified_base 84: mod_base = OTHER; note = uracil
  modified_base 91: mod_base = OTHER; note = uracil
  modified_base 102..103: mod_base = OTHER; note = uracil
  modified_base 107: mod_base = OTHER; note = uracil
  modified_base 112: mod_base = OTHER; note = uracil
  modified_base 115..117: mod_base = OTHER; note = uracil
  modified_base 121: mod_base = OTHER; note = uracil
  modified_base 125: mod_base = OTHER; note = uracil
  modified_base 129: mod_base = OTHER; note = uracil
  modified_base 133: mod_base = OTHER; note = uracil
  modified_base 135: mod_base = OTHER; note = uracil
  modified_base 143: mod_base = OTHER; note = uracil
  modified_base 152..153: mod_base = OTHER; note = uracil
  modified_base 163: mod_base = OTHER; note = uracil
  modified_base 167: mod_base = OTHER; note = uracil
  modified_base 169: mod_base = OTHER; note = uracil
  modified_base 173: mod_base = OTHER; note = uracil
  modified_base 177..182: mod_base = OTHER; note = uracil
  modified_base 184: mod_base = OTHER; note = uracil
  modified_base 186..188: mod_base = OTHER; note = uracil
  modified_base 192..193: mod_base = OTHER; note = uracil
  modified_base 195..197: mod_base = OTHER; note = uracil
  modified_base 200: mod_base = OTHER; note = uracil
  modified_base 203: mod_base = OTHER; note = uracil
  modified_base 207: mod_base = OTHER; note = uracil
  modified_base 211: mod_base = OTHER; note = uracil
  modified_base 221: mod_base = OTHER; note = uracil
  modified_base 226: mod_base = OTHER; note = uracil
  modified_base 233: mod_base = OTHER; note = uracil
  modified_base 241: mod_base = OTHER; note = uracil
  modified_base 244..245: mod_base = OTHER; note = uracil
  modified_base 249..250: mod_base = OTHER; note = uracil
  modified_base 264: mod_base = OTHER; note = uracil
  modified_base 266..267: mod_base = OTHER; note = uracil
  modified_base 273: mod_base = OTHER; note = uracil
  modified_base 275..276: mod_base = OTHER; note = uracil
  modified_base 278: mod_base = OTHER; note = uracil
  modified_base 289: mod_base = OTHER; note = uracil
  modified_base 291..292: mod_base = OTHER; note = uracil
  modified_base 299: mod_base = OTHER; note = uracil
  modified_base 108: mod_base = m5c
  modified_base 164: mod_base = m5c
  modified_base 229: mod_base = m5c
  variation 150: note = CpG site, residue is C if methylated or T(=U) if unmethylated
aaatatagttagtttgttttagtttttgtttttattttttttttttttttttttgttttagttttttgttttatagtgatgggtttgggattatggggtgtttatttcgggtttttttggtttgtttatttttttatgggtgttttgagygttttttttgagtcggtttaggttttttttttatatttttttttttttgtttttatttggtagtgagggttagagtttcggttagtgagttatttaaatttgggtgtggaaagtatttgggatattatttgtatttggttttttttagtt

SEQ ID NO: 498 - DNA, 300 bp, synthetic construct
  source 1..300: mol_type = other DNA
  modified_base 3: mod_base = OTHER; note = uracil
  modified_base 13..14: mod_base = OTHER; note = uracil
  modified_base 20: mod_base = OTHER; note = uracil
  modified_base 30..32: mod_base = OTHER; note = uracil
  modified_base 38: mod_base = OTHER; note = uracil
  modified_base 42..43: mod_base = OTHER; note = uracil
  modified_base 45: mod_base = OTHER; note = uracil
  modified_base 47..49: mod_base = OTHER; note = uracil
  modified_base 62: mod_base = OTHER; note = uracil
  modified_base 64: mod_base = OTHER; note = uracil
  modified_base 66: mod_base = OTHER; note = uracil
  modified_base 70: mod_base = OTHER; note = uracil
  modified_base 76: mod_base = OTHER; note = uracil
  modified_base 78: mod_base = OTHER; note = uracil
  modified_base 82..84: mod_base = OTHER; note = uracil
  modified_base 86: mod_base = OTHER; note = uracil
  modified_base 88: mod_base = OTHER; note = uracil
  modified_base 91..92: mod_base = OTHER; note = uracil
  modified_base 102: mod_base = OTHER; note = uracil
  modified_base 129..130: mod_base = OTHER; note = uracil
  modified_base 135: mod_base = OTHER; note = uracil
  modified_base 139: mod_base = OTHER; note = uracil
  modified_base 141: mod_base = OTHER; note = uracil
  modified_base 152: mod_base = OTHER; note = uracil
  modified_base 154: mod_base = OTHER; note = uracil
  modified_base 159: mod_base = OTHER; note = uracil
  modified_base 161..163: mod_base = OTHER; note = uracil
  modified_base 177: mod_base = OTHER; note = uracil
  modified_base 181..182: mod_base = OTHER; note = uracil
  modified_base 190..191: mod_base = OTHER; note = uracil
  modified_base 201: mod_base = OTHER; note = uracil
  modified_base 203..206: mod_base = OTHER; note = uracil
  modified_base 212..214: mod_base = OTHER; note = uracil
  modified_base 218..220: mod_base = OTHER; note = uracil
  modified_base 223: mod_base = OTHER; note = uracil
  modified_base 225: mod_base = OTHER; note = uracil
  modified_base 233: mod_base = OTHER; note = uracil
  modified_base 240: mod_base = OTHER; note = uracil
  modified_base 246: mod_base = OTHER; note = uracil
  modified_base 273: mod_base = OTHER; note = uracil
  modified_base 279: mod_base = OTHER; note = uracil
  modified_base 285: mod_base = OTHER; note = uracil
  modified_base 289: mod_base = OTHER; note = uracil
  modified_base 293: mod_base = OTHER; note = uracil
  modified_base 71: mod_base = m5c
  modified_base 136: mod_base = m5c
  modified_base 192: mod_base = m5c
  variation 150: note = CpG site, residue is C if methylated or T(=U) if unmethylated
agttaaaaggagttaaatataagtggtgttttaggtgttttttatatttaggtttggatgatttattgatcgaagttttgatttttattgttagatagaagtagggaggaaagggtgtggggggaaagtttgagtcggtttaaaaaaggygtttaaagtatttatgagaaagtaagtaagttagggaagttcggaatggatattttatagttttaagtttattattgtgggataaggaattggagtaaagggaagggggaagaaaatgaggatagaggttagaatagattggttgtgttt

SEQ ID NO: 499 - DNA, 300 bp, synthetic construct
  source 1..300: mol_type = other DNA
  modified_base 3..6: mod_base = OTHER; note = uracil
  modified_base 12: mod_base = OTHER; note = uracil
  modified_base 17..18: mod_base = OTHER; note = uracil
  modified_base 25: mod_base = OTHER; note = uracil
  modified_base 30: mod_base = OTHER; note = uracil
  modified_base 33..35: mod_base = OTHER; note = uracil
  modified_base 39: mod_base = OTHER; note = uracil
  modified_base 42: mod_base = OTHER; note = uracil
  modified_base 48: mod_base = OTHER; note = uracil
  modified_base 72: mod_base = OTHER; note = uracil
  modified_base 85: mod_base = OTHER; note = uracil
  modified_base 90: mod_base = OTHER; note = uracil
  modified_base 92..93: mod_base = OTHER; note = uracil
  modified_base 95: mod_base = OTHER; note = uracil
  modified_base 100: mod_base = OTHER; note = uracil
  modified_base 107..108: mod_base = OTHER; note = uracil
  modified_base 112: mod_base = OTHER; note = uracil
  modified_base 115: mod_base = OTHER; note = uracil
  modified_base 128: mod_base = OTHER; note = uracil
  modified_base 137: mod_base = OTHER; note = uracil
  modified_base 147: mod_base = OTHER; note = uracil
  modified_base 149: mod_base = OTHER; note = uracil
  modified_base 152..153: mod_base = OTHER; note = uracil
  modified_base 155: mod_base = OTHER; note = uracil
  modified_base 163: mod_base = OTHER; note = uracil
  modified_base 169: mod_base = OTHER; note = uracil
  modified_base 173..174: mod_base = OTHER; note = uracil
  modified_base 179..181: mod_base = OTHER; note = uracil
  modified_base 185: mod_base = OTHER; note = uracil
  modified_base 187: mod_base = OTHER; note = uracil
  modified_base 192..194: mod_base = OTHER; note = uracil
  modified_base 198: mod_base = OTHER; note = uracil
  modified_base 200..205: mod_base = OTHER; note = uracil
  modified_base 207..209: mod_base = OTHER; note = uracil
  modified_base 211..214: mod_base = OTHER; note = uracil
  modified_base 216: mod_base = OTHER; note = uracil
  modified_base 225: mod_base = OTHER; note = uracil
  modified_base 227: mod_base = OTHER; note = uracil
  modified_base 230: mod_base = OTHER; note = uracil
  modified_base 248: mod_base = OTHER; note = uracil
  modified_base 257: mod_base = OTHER; note = uracil
  modified_base 259: mod_base = OTHER; note = uracil
  modified_base 264: mod_base = OTHER; note = uracil
  modified_base 273: mod_base = OTHER; note = uracil
  modified_base 278..279: mod_base = OTHER; note = uracil
  modified_base 281: mod_base = OTHER; note = uracil
  modified_base 289: mod_base = OTHER; note = uracil
  modified_base 291: mod_base = OTHER; note = uracil
  modified_base 294: mod_base = OTHER; note = uracil
  modified_base 299: mod_base = OTHER; note = uracil
  modified_base 44: mod_base = m5c
  modified_base 61: mod_base = m5c
  modified_base 73: mod_base = m5c
  modified_base 83: mod_base = m5c
  modified_base 101: mod_base = m5c
  modified_base 130: mod_base = m5c
  modified_base 134: mod_base = m5c
  modified_base 175: mod_base = m5c
  modified_base 190: mod_base = m5c
  modified_base 267: mod_base = m5c
  modified_base 282: mod_base = m5c
  variation 150: note = CpG site, residue is C if methylated or T(=U) if unmethylated
gtttttaaaggttgaatttttgattaatgtagtttaagttgtacgggtagagaaagggtgcggggtaggggtcggggttgggcgttgagtttttttgaatcggttgttaggtaatagaatggaaatttacgggcggttaaatggagtttygttataaatgttttgtggtaaattcggatttagttatatcgttttttttttttttttttattttattgagtttttttatttgtaaatgagaagggtgtagagaagattttttttttcggagttagtgttttcggtttgtattgtttttta

SEQ ID NO: 500 - DNA, 300 bp, synthetic construct
  source 1..300: mol_type = other DNA
  modified_base 8: mod_base = OTHER; note = uracil
  modified_base 13: mod_base = OTHER; note = uracil
  modified_base 17: mod_base = OTHER; note = uracil
  modified_base 24: mod_base = OTHER; note = uracil
  modified_base 26: mod_base = OTHER; note = uracil
  modified_base 30: mod_base = OTHER; note = uracil
  modified_base 32: mod_base = OTHER; note = uracil
  modified_base 46: mod_base = OTHER; note = uracil
  modified_base 49: mod_base = OTHER; note = uracil
  modified_base 51: mod_base = OTHER; note = uracil
  modified_base 54: mod_base = OTHER; note = uracil
  modified_base 56..58: mod_base = OTHER; note = uracil
  modified_base 61: mod_base = OTHER; note = uracil
  modified_base 63: mod_base = OTHER; note = uracil
  modified_base 69: mod_base = OTHER; note = uracil
  modified_base 81: mod_base = OTHER; note = uracil
  modified_base 83: mod_base = OTHER; note = uracil
  modified_base 118: mod_base = OTHER; note = uracil
  modified_base 124: mod_base = OTHER; note = uracil
  modified_base 133..134: mod_base = OTHER; note = uracil
  modified_base 136: mod_base = OTHER; note = uracil
  modified_base 141: mod_base = OTHER; note = uracil
  modified_base 155: mod_base = OTHER; note = uracil
  modified_base 157..158: mod_base = OTHER; note = uracil
  modified_base 165: mod_base = OTHER; note = uracil
  modified_base 168..169: mod_base = OTHER; note = uracil
  modified_base 179..180: mod_base = OTHER; note = uracil
  modified_base 184: mod_base = OTHER; note = uracil
  modified_base 190..191: mod_base = OTHER; note = uracil
  modified_base 195: mod_base = OTHER; note = uracil
  modified_base 198: mod_base = OTHER; note = uracil
  modified_base 204: mod_base = OTHER; note = uracil
  modified_base 212: mod_base = OTHER; note = uracil
  modified_base 214: mod_base = OTHER; note = uracil
  modified_base 219..221: mod_base = OTHER; note = uracil
  modified_base 224..226: mod_base = OTHER; note = uracil
  modified_base 230..233: mod_base = OTHER; note = uracil
  modified_base 236..238: mod_base = OTHER; note = uracil
  modified_base 241: mod_base = OTHER; note = uracil
  modified_base 243..245: mod_base = OTHER; note = uracil
  modified_base 249: mod_base = OTHER; note = uracil
  modified_base 251: mod_base = OTHER; note = uracil
  modified_base 254..255: mod_base = OTHER; note = uracil
  modified_base 260: mod_base = OTHER; note = uracil
  modified_base 263: mod_base = OTHER; note = uracil
  modified_base 269: mod_base = OTHER; note = uracil
  modified_base 272: mod_base = OTHER; note = uracil
  modified_base 279: mod_base = OTHER; note = uracil
  modified_base 287: mod_base = OTHER; note = uracil
  modified_base 290..291: mod_base = OTHER; note = uracil
  modified_base 300: mod_base = OTHER; note = uracil
  modified_base 18: mod_base = m5c
  modified_base 33: mod_base = m5c
  modified_base 110: mod_base = m5c
  modified_base 125: mod_base = m5c
  modified_base 166: mod_base = m5c
  modified_base 170: mod_base = m5c
  modified_base 199: mod_base = m5c
  modified_base 217: mod_base = m5c
  modified_base 227: mod_base = m5c
  modified_base 239: mod_base = m5c
  modified_base 256: mod_base = m5c
  variation 150: note = CpG site, residue is C if methylated or T(=U) if unmethylated
tgaaaagtagtgtaaatcggaggtattgatttcgaagaaaagagttttttttgtattttttttatttatagatgagaaaatttagtggggtgggaggggggagaaagggcgatgtgattgggttcgggtttgttatagaatatttgtggyggagttttatttagtcgttcgtgaatttttattttgttgtttggtaatcggtttagaggagtttagcgtttaatttcggtttttatttcgtattttttttttgttcgtgtagtttgggttgtattgattaaaggtttagtttttggggat

SEQ ID NO: 501 - DNA, 300 bp, synthetic construct
  source 1..300: mol_type = other DNA
  modified_base 1: mod_base = OTHER; note = uracil
  modified_base 3..4: mod_base = OTHER; note = uracil
  modified_base 6: mod_base = OTHER; note = uracil
  modified_base 9: mod_base = OTHER; note = uracil
  modified_base 13: mod_base = OTHER; note = uracil
  modified_base 17..21: mod_base = OTHER; note = uracil
  modified_base 33: mod_base = OTHER; note = uracil
  modified_base 38..39: mod_base = OTHER; note = uracil
  modified_base 44..45: mod_base = OTHER; note = uracil
  modified_base 50: mod_base = OTHER; note = uracil
  modified_base 54: mod_base = OTHER; note = uracil
  modified_base 74: mod_base = OTHER; note = uracil
  modified_base 84: mod_base = OTHER; note = uracil
  modified_base 91: mod_base = OTHER; note = uracil
  modified_base 93: mod_base = OTHER; note = uracil
  modified_base 96: mod_base = OTHER; note = uracil
  modified_base 104: mod_base = OTHER; note = uracil
  modified_base 106: mod_base = OTHER; note = uracil
  modified_base 114: mod_base = OTHER; note = uracil
  modified_base 119: mod_base = OTHER; note = uracil
  modified_base 124..126: mod_base = OTHER; note = uracil
  modified_base 129: mod_base = OTHER; note = uracil
  modified_base 132: mod_base = OTHER; note = uracil
  modified_base 134: mod_base = OTHER; note = uracil
  modified_base 150: mod_base = OTHER; note = uracil
  modified_base 153..154: mod_base = OTHER; note = uracil
  modified_base 162: mod_base = OTHER; note = uracil
  modified_base 180..181: mod_base = OTHER; note = uracil
  modified_base 190..192: mod_base = OTHER; note = uracil
  modified_base 197: mod_base = OTHER; note = uracil
  modified_base 201..202: mod_base = OTHER; note = uracil
  modified_base 205: mod_base = OTHER; note = uracil
  modified_base 214: mod_base = OTHER; note = uracil
  modified_base 217: mod_base = OTHER; note = uracil
  modified_base 219: mod_base = OTHER; note = uracil
  modified_base 222..223: mod_base = OTHER; note = uracil
  modified_base 228..230: mod_base = OTHER; note = uracil
  modified_base 234..235: mod_base = OTHER; note = uracil
  modified_base 237..241: mod_base = OTHER; note = uracil
  modified_base 243: mod_base = OTHER; note = uracil
  modified_base 246..248: mod_base = OTHER; note = uracil
  modified_base 250..252: mod_base = OTHER; note = uracil
  modified_base 255..256: mod_base = OTHER; note = uracil
  modified_base 259: mod_base = OTHER; note = uracil
  modified_base 262..265: mod_base = OTHER; note = uracil
  modified_base 271: mod_base = OTHER; note = uracil
  modified_base 274..275: mod_base = OTHER; note = uracil
  modified_base 278: mod_base = OTHER; note = uracil
  modified_base 282: mod_base = OTHER; note = uracil
  modified_base 289: mod_base = OTHER; note = uracil
  modified_base 292: mod_base = OTHER; note = uracil
  modified_base 297: mod_base = OTHER; note = uracil
  modified_base 7: mod_base = m5c
  modified_base 10: mod_base = m5c
  modified_base 15: mod_base = m5c
  modified_base 47: mod_base = m5c
  modified_base 55: mod_base = m5c
  modified_base 97: mod_base = m5c
  modified_base 112: mod_base = m5c
  modified_base 156: mod_base = m5c
  modified_base 163: mod_base = m5c
  modified_base 167: mod_base = m5c
  modified_base 169: mod_base = m5c
  modified_base 178: mod_base = m5c
  modified_base 182: mod_base = m5c
  modified_base 193: mod_base = m5c
  modified_base 198: mod_base = m5c
  modified_base 210: mod_base = m5c
  modified_base 212: mod_base = m5c
  modified_base 215: mod_base = m5c
  modified_base 220: mod_base = m5c
  modified_base 226: mod_base = m5c
  modified_base 244: mod_base = m5c
  modified_base 253: mod_base = m5c
  modified_base 280: mod_base = m5c
  modified_base 284: mod_base = m5c
  variation 151: note = CpG site, residue is C if methylated or T(=U) if unmethylated
ttttatcgtcggttcgttttttgaggagggggttgggttagggtttcggttgatcggggaggaagaaggggagtagagaaaaatatgagttatagtcgtgtgttattggagcgtattttaattttttgtattataggaggtgtggaaggtygtttcggggatcgggcgcgggaggtgcgttcgagaaggtttcgggtcggtttgtagggcgcgtcgtttcgtttgcgttttttttttttttatcgtttttttcgttatttttttttttggtttttttttcgttcggtgtaataagttttt

SEQ ID NO: 502 - DNA, 301 bp, synthetic construct
  source 1..301: mol_type = other DNA
  modified_base 6: mod_base = OTHER; note = uracil
  modified_base 13: mod_base = OTHER; note = uracil
  modified_base 15: mod_base = OTHER; note = uracil
  modified_base 31..32: mod_base = OTHER; note = uracil
  modified_base 76: mod_base = OTHER; note = uracil
  modified_base 92..94: mod_base = OTHER; note = uracil
  modified_base 97: mod_base = OTHER; note = uracil
  modified_base 101: mod_base = OTHER; note = uracil
  modified_base 105..106: mod_base = OTHER; note = uracil
  modified_base 112..113: mod_base = OTHER; note = uracil
  modified_base 116: mod_base = OTHER; note = uracil
  modified_base 124: mod_base = OTHER; note = uracil
  modified_base 126..127: mod_base = OTHER; note = uracil
  modified_base 129..130: mod_base = OTHER; note = uracil
  modified_base 135..136: mod_base = OTHER; note = uracil
  modified_base 141..143: mod_base = OTHER; note = uracil
  modified_base 153..154: mod_base = OTHER; note = uracil
  modified_base 157..158: mod_base = OTHER; note = uracil
  modified_base 160: mod_base = OTHER; note = uracil
  modified_base 162..163: mod_base = OTHER; note = uracil
  modified_base 165..166: mod_base = OTHER; note = uracil
  modified_base 174: mod_base = OTHER; note = uracil
  modified_base 191: mod_base = OTHER; note = uracil
  modified_base 193..194: mod_base = OTHER; note = uracil
  modified_base 200: mod_base = OTHER; note = uracil
  modified_base 202: mod_base = OTHER; note = uracil
  modified_base 207: mod_base = OTHER; note = uracil
  modified_base 213: mod_base = OTHER; note = uracil
  modified_base 215: mod_base = OTHER; note = uracil
  modified_base 224: mod_base = OTHER; note = uracil
  modified_base 226: mod_base = OTHER; note = uracil
  modified_base 229: mod_base = OTHER; note = uracil
  modified_base 231..234: mod_base = OTHER; note = uracil
  modified_base 237: mod_base = OTHER; note = uracil
  modified_base 240..241: mod_base = OTHER; note = uracil
  modified_base 243..245: mod_base = OTHER; note = uracil
  modified_base 250: mod_base = OTHER; note = uracil
  modified_base 253: mod_base = OTHER; note = uracil
  modified_base 259..261: mod_base = OTHER; note = uracil
  modified_base 265..267: mod_base = OTHER; note = uracil
  modified_base 270..274: mod_base = OTHER; note = uracil
  modified_base 276..277: mod_base = OTHER; note = uracil
  modified_base 279: mod_base = OTHER; note = uracil
  modified_base 290: mod_base = OTHER; note = uracil
  modified_base 16: mod_base = m5c
  modified_base 20: mod_base = m5c
  modified_base 47: mod_base = m5c
  modified_base 56: mod_base = m5c
  modified_base 74: mod_base = m5c
  modified_base 80: mod_base = m5c
  modified_base 85: mod_base = m5c
  modified_base 88: mod_base = m5c
  modified_base 90: mod_base = m5c
  modified_base 102: mod_base = m5c
  modified_base 107: mod_base = m5c
  modified_base 118: mod_base = m5c
  modified_base 122: mod_base = m5c
  modified_base 131: mod_base = m5c
  modified_base 133: mod_base = m5c
  modified_base 137: mod_base = m5c
  modified_base 144: mod_base = m5c
  modified_base 150: mod_base = m5c
  modified_base 189: mod_base = m5c
  modified_base 204: mod_base = m5c
  modified_base 246: mod_base = m5c
  modified_base 254: mod_base = m5c
  modified_base 286: mod_base = m5c
  modified_base 291: mod_base = m5c
  modified_base 294: mod_base = m5c
  variation 149: note = CpG site, residue is C if methylated or T(=U) if unmethylated
aaagatttgttgtatcgagcgagaaggaagttaaaggggaagatggcggggagggcggtgggggaggaaagggcgtaggcggagcggcgcgttttgtaggtcggttcggggttttttcgggcgtatttttcgcgttcggttttcgaggycggttttttatattttttgtgatgtagggaattgaaatgcgttttagtgatatacggttgtgatttatgtttttttttgtttttttttttttttttcggttagtcgaggttttggtttagttttttttttagggggcgagtcggcggtggag

SEQ ID NO: 503 - DNA, 300 bp, synthetic construct
  source 1..300: mol_type = other DNA
  modified_base 1..2: mod_base = OTHER; note = uracil
  modified_base 10: mod_base = OTHER; note = uracil
  modified_base 14: mod_base = OTHER; note = uracil
  modified_base 16..18: mod_base = OTHER; note = uracil
  modified_base 25: mod_base = OTHER; note = uracil
  modified_base 27: mod_base = OTHER; note = uracil
  modified_base 37..38: mod_base = OTHER; note = uracil
  modified_base 43: mod_base = OTHER; note = uracil
  modified_base 48: mod_base = OTHER; note = uracil
  modified_base 50: mod_base = OTHER; note = uracil
  modified_base 71: mod_base = OTHER; note = uracil
  modified_base 75: mod_base = OTHER; note = uracil
  modified_base 77..79: mod_base = OTHER; note = uracil
  modified_base 83: mod_base = OTHER; note = uracil
  modified_base 88: mod_base = OTHER; note = uracil
  modified_base 91: mod_base = OTHER; note = uracil
  modified_base 101: mod_base = OTHER; note = uracil
  modified_base 105: mod_base = OTHER; note = uracil
  modified_base 107..108: mod_base = OTHER; note = uracil
  modified_base 111: mod_base = OTHER; note = uracil
  modified_base 115: mod_base = OTHER; note = uracil
  modified_base 123..124: mod_base = OTHER; note = uracil
  modified_base 128..130: mod_base = OTHER; note = uracil
  modified_base 144: mod_base = OTHER; note = uracil
  modified_base 149: mod_base = OTHER; note = uracil
  modified_base 155..157: mod_base = OTHER; note = uracil
  modified_base 159: mod_base = OTHER; note = uracil
  modified_base 161..165: mod_base = OTHER; note = uracil
  modified_base 170..172: mod_base = OTHER; note = uracil
  modified_base 176..178: mod_base = OTHER; note = uracil
  modified_base 181..183: mod_base = OTHER; note = uracil
  modified_base 186..187: mod_base = OTHER; note = uracil
  modified_base 192: mod_base = OTHER; note = uracil
  modified_base 198: mod_base = OTHER; note = uracil
  modified_base 200: mod_base = OTHER; note = uracil
  modified_base 202..204: mod_base = OTHER; note = uracil
  modified_base 207..208: mod_base = OTHER; note = uracil
  modified_base 211..214: mod_base = OTHER; note = uracil
  modified_base 219: mod_base = OTHER; note = uracil
  modified_base 221..222: mod_base = OTHER; note = uracil
  modified_base 225: mod_base = OTHER; note = uracil
  modified_base 228..229: mod_base = OTHER; note = uracil
  modified_base 231..232: mod_base = OTHER; note = uracil
  modified_base 234..235: mod_base = OTHER; note = uracil
  modified_base 239: mod_base = OTHER; note = uracil
  modified_base 241: mod_base = OTHER; note = uracil
  modified_base 245..247: mod_base = OTHER; note = uracil
  modified_base 250: mod_base = OTHER; note = uracil
  modified_base 253: mod_base = OTHER; note = uracil
  modified_base 257: mod_base = OTHER; note = uracil
  modified_base 259: mod_base = OTHER; note = uracil
  modified_base 262: mod_base = OTHER; note = uracil
  modified_base 267..269: mod_base = OTHER; note = uracil
  modified_base 272..273: mod_base = OTHER; note = uracil
  modified_base 275: mod_base = OTHER; note = uracil
  modified_base 277: mod_base = OTHER; note = uracil
  modified_base 280..283: mod_base = OTHER; note = uracil
  modified_base 285..287: mod_base = OTHER; note = uracil
  modified_base 292: mod_base = OTHER; note = uracil
  modified_base 295: mod_base = OTHER; note = uracil
  modified_base 297: mod_base = OTHER; note = uracil
  modified_base 56: mod_base = m5c
  modified_base 72: mod_base = m5c
  modified_base 112: mod_base = m5c
  modified_base 125: mod_base = m5c
  modified_base 138: mod_base = m5c
  modified_base 193: mod_base = m5c
  modified_base 216: mod_base = m5c
  modified_base 242: mod_base = m5c
  modified_base 278: mod_base = m5c
  variation 150: note = CpG site, residue is C if methylated or T(=U) if unmethylated
tttgaagagtattttttttgagtgtttaatgatatgttagagtatgttttaaatgcggaggatggggaggtcggttttttggtagatttttatggagaagttgattttagtcggtttgtgtgttcgttttagaggagcggaaatagagtygaagtttatatttttagggtttaggtttagtttttttaagttcggagtttatttagtttgtttttcggtttttttatttttttttagatatcgtttttttttttgtttttgtattttttatttttttcgtttttttttgtgttgttttgt

SEQ ID NO: 504 - DNA, 300 bp, synthetic construct
  source 1..300: mol_type = other DNA
  modified_base 2: mod_base = OTHER; note = uracil
  modified_base 7: mod_base = OTHER; note = uracil
  modified_base 10: mod_base = OTHER; note = uracil
  modified_base 12: mod_base = OTHER; note = uracil
  modified_base 40: mod_base = OTHER; note = uracil
  modified_base 46: mod_base = OTHER; note = uracil
  modified_base 64: mod_base = OTHER; note = uracil
  modified_base 83: mod_base = OTHER; note = uracil
  modified_base 91: mod_base = OTHER; note = uracil
  modified_base 95: mod_base = OTHER; note = uracil
  modified_base 104: mod_base = OTHER; note = uracil
  modified_base 106: mod_base = OTHER; note = uracil
  modified_base 111: mod_base = OTHER; note = uracil
  modified_base 121: mod_base = OTHER; note = uracil
  modified_base 126..127: mod_base = OTHER; note = uracil
  modified_base 132..134: mod_base = OTHER; note = uracil
  modified_base 147: mod_base = OTHER; note = uracil
  modified_base 153: mod_base = OTHER; note = uracil
  modified_base 155: mod_base = OTHER; note = uracil
  modified_base 161: mod_base = OTHER; note = uracil
  modified_base 164: mod_base = OTHER; note = uracil
  modified_base 166..167: mod_base = OTHER; note = uracil
  modified_base 169: mod_base = OTHER; note = uracil
  modified_base 179: mod_base = OTHER; note = uracil
  modified_base 181: mod_base = OTHER; note = uracil
  modified_base 183: mod_base = OTHER; note = uracil
  modified_base 187: mod_base = OTHER; note = uracil
  modified_base 191: mod_base = OTHER; note = uracil
  modified_base 198: mod_base = OTHER; note = uracil
  modified_base 201: mod_base = OTHER; note = uracil
  modified_base 204: mod_base = OTHER; note = uracil
  modified_base 206..207: mod_base = OTHER; note = uracil
  modified_base 216: mod_base = OTHER; note = uracil
  modified_base 219..220: mod_base = OTHER; note = uracil
  modified_base 227: mod_base = OTHER; note = uracil
  modified_base 231..232: mod_base = OTHER; note = uracil
  modified_base 234..237: mod_base = OTHER; note = uracil
  modified_base 240..241: mod_base = OTHER; note = uracil
  modified_base 243: mod_base = OTHER; note = uracil
  modified_base 246: mod_base = OTHER; note = uracil
  modified_base 255: mod_base = OTHER; note = uracil
  modified_base 259: mod_base = OTHER; note = uracil
  modified_base 261: mod_base = OTHER; note = uracil
  modified_base 265: mod_base = OTHER; note = uracil
  modified_base 270: mod_base = OTHER; note = uracil
  modified_base 277: mod_base = OTHER; note = uracil
  modified_base 279: mod_base = OTHER; note = uracil
  modified_base 281: mod_base = OTHER; note = uracil
  modified_base 292: mod_base = OTHER; note = uracil
  modified_base 294: mod_base = OTHER; note = uracil
  modified_base 297: mod_base = OTHER; note = uracil
  modified_base 22: mod_base = m5c
  modified_base 58: mod_base = m5c
  modified_base 84: mod_base = m5c
  modified_base 107: mod_base = m5c
  modified_base 162: mod_base = m5c
  modified_base 175: mod_base = m5c
  modified_base 188: mod_base = m5c
  modified_base 228: mod_base = m5c
  modified_base 244: mod_base = m5c
  variation 150: note = CpG site, residue is C if methylated or T(=U) if unmethylated
atagagtagtatagggaggggcggagaggatgggaaatgtagagatagaagaagggacggtgtttggaggaggatgaaggagtcgaggggtaggttgggtgagtttcggatttggaagggttgggtttgggttttgggggtgtgggtttyggttttgttttcgtttttttgggacgggtatataagtcggttggagttagtttttttatgaagatttgttagggagtcggtttttttatttttcgtatttgagatatgttttggtatattattgagtatttagggagaatgttttttagg

SEQ ID NO: 505 - DNA, 300 bp, synthetic construct
  source 1..300: mol_type = other DNA
  modified_base 5: mod_base = OTHER; note = uracil
  modified_base 13..14: mod_base = OTHER; note = uracil
  modified_base 20: mod_base = OTHER; note = uracil
  modified_base 23: mod_base = OTHER; note = uracil
  modified_base 25: mod_base = OTHER; note = uracil
  modified_base 27: mod_base = OTHER; note = uracil
  modified_base 31: mod_base = OTHER; note = uracil
  modified_base 35: mod_base = OTHER; note = uracil
  modified_base 37: mod_base = OTHER; note = uracil
  modified_base 40: mod_base = OTHER; note = uracil
  modified_base 45: mod_base = OTHER; note = uracil
  modified_base 47: mod_base = OTHER; note = uracil
  modified_base 50..51: mod_base = OTHER; note = uracil
  modified_base 56..57: mod_base = OTHER; note = uracil
  modified_base 64..65: mod_base = OTHER; note = uracil
  modified_base 74: mod_base = OTHER; note = uracil
  modified_base 77..78: mod_base = OTHER; note = uracil
  modified_base 91: mod_base = OTHER; note = uracil
  modified_base 109: mod_base = OTHER; note = uracil
  modified_base 122: mod_base = OTHER; note = uracil
  modified_base 127: mod_base = OTHER; note = uracil
  modified_base 137..138: mod_base = OTHER; note = uracil
  modified_base 142..143: mod_base = OTHER; note = uracil
  modified_base 149: mod_base = OTHER; note = uracil
  modified_base 153: mod_base = OTHER; note = uracil
  modified_base 159: mod_base = OTHER; note = uracil
  modified_base 175: mod_base = OTHER; note = uracil
  modified_base 179..180: mod_base = OTHER; note = uracil
  modified_base 190: mod_base = OTHER; note = uracil
  modified_base 197: mod_base = OTHER; note = uracil
  modified_base 201: mod_base = OTHER; note = uracil
  modified_base 206: mod_base = OTHER; note = uracil
  modified_base 210: mod_base = OTHER; note = uracil
  modified_base 212..214: mod_base = OTHER; note = uracil
  modified_base 216..218: mod_base = OTHER; note = uracil
  modified_base 220: mod_base = OTHER; note = uracil
  modified_base 222..223: mod_base = OTHER; note = uracil
  modified_base 229: mod_base = OTHER; note = uracil
  modified_base 231: mod_base = OTHER; note = uracil
  modified_base 233: mod_base = OTHER; note = uracil
  modified_base 236..238: mod_base = OTHER; note = uracil
  modified_base 240..242: mod_base = OTHER; note = uracil
  modified_base 246: mod_base = OTHER; note = uracil
  modified_base 248: mod_base = OTHER; note = uracil
  modified_base 253..255: mod_base = OTHER; note = uracil
  modified_base 257..259: mod_base = OTHER; note = uracil
  modified_base 262..264: mod_base = OTHER; note = uracil
  modified_base 270: mod_base = OTHER; note = uracil
  modified_base 275..277: mod_base = OTHER; note = uracil
  modified_base 284: mod_base = OTHER; note = uracil
  modified_base 290: mod_base = OTHER; note = uracil
  modified_base 293: mod_base = OTHER; note = uracil
  modified_base 295..296: mod_base = OTHER; note = uracil
  modified_base 298: mod_base = OTHER; note = uracil
  modified_base 300: mod_base = OTHER; note = uracil
  modified_base 58: mod_base = m5c
  modified_base 66: mod_base = m5c
  modified_base 70: mod_base = m5c
  modified_base 110: mod_base = m5c
  modified_base 120: mod_base = m5c
  modified_base 131: mod_base = m5c
  modified_base 133: mod_base = m5c
  modified_base 135: mod_base = m5c
  modified_base 139: mod_base = m5c
  modified_base 154: mod_base = m5c
  modified_base 173: mod_base = m5c
  modified_base 176: mod_base = m5c
  modified_base 227: mod_base = m5c
  modified_base 243: mod_base = m5c
  modified_base 265: mod_base = m5c
  modified_base 286: mod_base = m5c
  modified_base 291: mod_base = m5c
  variation 151: note = CpG site, residue is C if methylated or T(=U) if unmethylated
atgtttgggaggttaaaagtattttttagatagtttttataggatttttttaggtttcggaagttcgagcgagttttttggaggaggtggttggggagagtggaggagtcggtaggggtcgttgtgtttgcgcgcgttcgtttaggaattygtcggggttgtggggagggggcgtcggtttggagaggataatgtatagtttgttttaatatttatttattttaaacgtatattttttatttcgttttttgttttttttagtttcggggttagattttgagggttcgggtcgtattttat

SEQ ID NO: 506 - DNA, 300 bp, synthetic construct
  source 1..300: mol_type = other DNA
  modified_base 12..13: mod_base = OTHER; note = uracil
  modified_base 18..20: mod_base = OTHER; note = uracil
  modified_base 22: mod_base = OTHER; note = uracil
  modified_base 28: mod_base = OTHER; note = uracil
  modified_base 32..34: mod_base = OTHER; note = uracil
  modified_base 40: mod_base = OTHER; note = uracil
  modified_base 50: mod_base = OTHER; note = uracil
  modified_base 98: mod_base = OTHER; note = uracil
  modified_base 102: mod_base = OTHER; note = uracil
  modified_base 107: mod_base = OTHER; note = uracil
  modified_base 113..114: mod_base = OTHER; note = uracil
  modified_base 116: mod_base = OTHER; note = uracil
  modified_base 118..119: mod_base = OTHER; note = uracil
  modified_base 123: mod_base = OTHER; note = uracil
  modified_base 129..133: mod_base = OTHER; note = uracil
  modified_base 135..138: mod_base = OTHER; note = uracil
  modified_base 140: mod_base = OTHER; note = uracil
  modified_base 143..145: mod_base = OTHER; note = uracil
  modified_base 155..156: mod_base = OTHER; note = uracil
  modified_base 171: mod_base = OTHER; note = uracil
  modified_base 175: mod_base = OTHER; note = uracil
  modified_base 177: mod_base = OTHER; note = uracil
  modified_base 183..186: mod_base = OTHER; note = uracil
  modified_base 189: mod_base = OTHER; note = uracil
  modified_base 193: mod_base = OTHER; note = uracil
  modified_base 195..196: mod_base = OTHER; note = uracil
  modified_base 198..199: mod_base = OTHER; note = uracil
  modified_base 201: mod_base = OTHER; note = uracil
  modified_base 203: mod_base = OTHER; note = uracil
  modified_base 205..208: mod_base = OTHER; note = uracil
  modified_base 211..212: mod_base = OTHER; note = uracil
  modified_base 214..215: mod_base = OTHER; note = uracil
  modified_base 217..218: mod_base = OTHER; note = uracil
  modified_base 220..221: mod_base = OTHER; note = uracil
  modified_base 228: mod_base = OTHER; note = uracil
  modified_base 232: mod_base = OTHER; note = uracil
  modified_base 238: mod_base = OTHER; note = uracil
  modified_base 241: mod_base = OTHER; note = uracil
  modified_base 247..248: mod_base = OTHER; note = uracil
  modified_base 258..259: mod_base = OTHER; note = uracil
  modified_base 268: mod_base = OTHER; note = uracil
  modified_base 272: mod_base = OTHER; note = uracil
  modified_base 282: mod_base = OTHER; note = uracil
  modified_base 289..290: mod_base = OTHER; note = uracil
  modified_base 292..294: mod_base = OTHER; note = uracil
  modified_base 298: mod_base = OTHER; note = uracil
  modified_base 9: mod_base = m5c
  modified_base 14: mod_base = m5c
  modified_base 35: mod_base = m5c
  modified_base 57: mod_base = m5c
  modified_base 73: mod_base = m5c
  modified_base 124: mod_base = m5c
  modified_base 127: mod_base = m5c
  modified_base 146: mod_base = m5c
  modified_base 161: mod_base = m5c
  modified_base 165: mod_base = m5c
  modified_base 167: mod_base = m5c
  modified_base 169: mod_base = m5c
  modified_base 180: mod_base = m5c
  modified_base 190: mod_base = m5c
  modified_base 230: mod_base = m5c
  modified_base 234: mod_base = m5c
  modified_base 242: mod_base = m5c
  variation 149: note = CpG site, residue is C if methylated or T(=U) if unmethylated
gtgaggtgcggttcgagtttttagggtttagtttcggggttgggagggataagagacggggtgggaagtgtgcgtttggagtgggtgggtgttagaatagattgtatattgttttttttaggtcggcgttttttttttatagtttcggygagtttttggacgggcgcgcgtaagtatagcgatttttatcggtttttttattttttttagttattttttttaggaagttcgttcgggttttcgggatttggaagagttttgtagagattgtttgagagatgtttttggttttttagatat

SEQ ID NO: 507 - DNA, 300 bp, synthetic construct
  source 1..300: mol_type = other DNA
  modified_base 7: mod_base = OTHER; note = uracil
  modified_base 15: mod_base = OTHER; note = uracil
  modified_base 36: mod_base = OTHER; note = uracil
  modified_base 72: mod_base = OTHER; note = uracil
  modified_base 75..76: mod_base = OTHER; note = uracil
  modified_base 80..81: mod_base = OTHER; note = uracil
  modified_base 96: mod_base = OTHER; note = uracil
  modified_base 99: mod_base = OTHER; note = uracil
  modified_base 102: mod_base = OTHER; note = uracil
  modified_base 107: mod_base = OTHER; note = uracil
  modified_base 111: mod_base = OTHER; note = uracil
  modified_base 113: mod_base = OTHER; note = uracil
  modified_base 125: mod_base = OTHER; note = uracil
  modified_base 134: mod_base = OTHER; note = uracil
  modified_base 136..138: mod_base = OTHER; note = uracil
  modified_base 146: mod_base = OTHER; note = uracil
  modified_base 158: mod_base = OTHER; note = uracil
  modified_base 172: mod_base = OTHER; note = uracil
  modified_base 175..176: mod_base = OTHER; note = uracil
  modified_base 178..179: mod_base = OTHER; note = uracil
  modified_base 182: mod_base = OTHER; note = uracil
  modified_base 189..190: mod_base = OTHER; note = uracil
  modified_base 209: mod_base = OTHER; note = uracil
  modified_base 211: mod_base = OTHER; note = uracil
  modified_base 215: mod_base = OTHER; note = uracil
  modified_base 222..223: mod_base = OTHER; note = uracil
  modified_base 232: mod_base = OTHER; note = uracil
  modified_base 234: mod_base = OTHER; note = uracil
  modified_base 244: mod_base = OTHER; note = uracil
  modified_base 246..247: mod_base = OTHER; note = uracil
  modified_base 252: mod_base = OTHER; note = uracil
  modified_base 254..256: mod_base = OTHER; note = uracil
  modified_base 262..263: mod_base = OTHER; note = uracil
  modified_base 267: mod_base = OTHER; note = uracil
  modified_base 269: mod_base = OTHER; note = uracil
  modified_base 272..273: mod_base = OTHER; note = uracil
  modified_base 276: mod_base = OTHER; note = uracil
  modified_base 282: mod_base = OTHER; note = uracil
  modified_base 286..287: mod_base = OTHER; note = uracil
  modified_base 289: mod_base = OTHER; note = uracil
  modified_base 298: mod_base = OTHER; note = uracil
  modified_base 5: mod_base = m5c
  modified_base 11: mod_base = m5c
  modified_base 13: mod_base = m5c
  modified_base 47: mod_base = m5c
  modified_base 69: mod_base = m5c
  modified_base 97: mod_base = m5c
  modified_base 117: mod_base = m5c
  modified_base 126: mod_base = m5c
  modified_base 139: mod_base = m5c
  modified_base 141: mod_base = m5c
  modified_base 154: mod_base = m5c
  modified_base 156: mod_base = m5c
  modified_base 170: mod_base = m5c
  modified_base 173: mod_base = m5c
  modified_base 206: mod_base = m5c
  modified_base 235: mod_base = m5c
  modified_base 280: mod_base = m5c
  modified_base 290: mod_base = m5c
  variation 149: note = CpG site, residue is C if methylated or T(=U) if unmethylated
ggagcgttaacgcgtagtgggagggaaggagaggattgaagagagacgggggaggggagaggaggggtcggttgttaggtttaggtggggtgaattcgtagttgggttgatttaagcggaggagtcggaaggatatttcgcgaggtttyggggcgcgtttttagggaggcgtcgtttttagttttgtgttagaaagtgggggttgcggtttaggtttgaatttaagaaaggtttcgggtggaatttttgggtattttgggtttttattttgtttttaggcgttggttatcgttgggattt

SEQ ID NO: 508 - DNA, 300 bp, synthetic construct
  source 1..300: mol_type = other DNA
  modified_base 4..6: mod_base = OTHER; note = uracil
  modified_base 15..16: mod_base = OTHER; note = uracil
  modified_base 21..22: mod_base = OTHER; note = uracil
  modified_base 29: mod_base = OTHER; note = uracil
  modified_base 40..42: mod_base = OTHER; note = uracil
  modified_base 49..51: mod_base = OTHER; note = uracil
  modified_base 59..60: mod_base = OTHER; note = uracil
  modified_base 62..63: mod_base = OTHER; note = uracil
  modified_base 69..70: mod_base = OTHER; note = uracil
  modified_base 74: mod_base = OTHER; note = uracil
  modified_base 82: mod_base = OTHER; note = uracil
  modified_base 86..87: mod_base = OTHER; note = uracil
  modified_base 92: mod_base = OTHER; note = uracil
  modified_base 95: mod_base = OTHER; note = uracil
  modified_base 98..102: mod_base = OTHER; note = uracil
  modified_base 104: mod_base = OTHER; note = uracil
  modified_base 108: mod_base = OTHER; note = uracil
  modified_base 112: mod_base = OTHER; note = uracil
  modified_base 114: mod_base = OTHER; note = uracil
  modified_base 119: mod_base = OTHER; note = uracil
  modified_base 131..132: mod_base = OTHER; note = uracil
  modified_base 134..136: mod_base = OTHER; note = uracil
  modified_base 147..149: mod_base = OTHER; note = uracil
  modified_base 155..156: mod_base = OTHER; note = uracil
  modified_base 168..169: mod_base = OTHER; note = uracil
  modified_base 172: mod_base = OTHER; note = uracil
  modified_base 176: mod_base = OTHER; note = uracil
  modified_base 178..179: mod_base = OTHER; note = uracil
  modified_base 181: mod_base = OTHER; note = uracil
  modified_base 184: mod_base = OTHER; note = uracil
  modified_base 191: mod_base = OTHER; note = uracil
  modified_base 194..196: mod_base = OTHER; note = uracil
  modified_base 199: mod_base = OTHER; note = uracil
  modified_base 208: mod_base = OTHER; note = uracil
  modified_base 210..213: mod_base = OTHER; note = uracil
  modified_base 215..216: mod_base = OTHER; note = uracil
  modified_base 221..222: mod_base = OTHER; note = uracil
  modified_base 226: mod_base = OTHER; note = uracil
  modified_base 229: mod_base = OTHER; note = uracil
  modified_base 233..236: mod_base = OTHER; note = uracil
  modified_base 238..239: mod_base = OTHER; note = uracil
  modified_base 241: mod_base = OTHER; note = uracil
  modified_base 243..246: mod_base = OTHER; note = uracil
  modified_base 248..251: mod_base = OTHER; note = uracil
  modified_base 255: mod_base = OTHER; note = uracil
  modified_base 257: mod_base = OTHER; note = uracil
  modified_base 259: mod_base = OTHER; note = uracil
  modified_base 262: mod_base = OTHER; note = uracil
  modified_base 266..267: mod_base = OTHER; note = uracil
  modified_base 269: mod_base = OTHER; note = uracil
  modified_base 271..272: mod_base = OTHER; note = uracil
  modified_base 275..277: mod_base = OTHER; note = uracil
  modified_base 279..281: mod_base = OTHER; note = uracil
  modified_base 283: mod_base = OTHER; note = uracil
  modified_base 296: mod_base = OTHER; note = uracil
  modified_base 298..300: mod_base = OTHER; note = uracil
  modified_base 9: mod_base = m5c
  modified_base 19: mod_base = m5c
  modified_base 64: mod_base = m5c
  modified_base 93: mod_base = m5c
  modified_base 126: mod_base = m5c
  modified_base 129: mod_base = m5c
  modified_base 143: mod_base = m5c
  modified_base 145: mod_base = m5c
  modified_base 158: mod_base = m5c
  modified_base 160: mod_base = m5c
  modified_base 173: mod_base = m5c
  modified_base 182: mod_base = m5c
  modified_base 202: mod_base = m5c
  modified_base 230: mod_base = m5c
  modified_base 252: mod_base = m5c
  modified_base 286: mod_base = m5c
  modified_base 288: mod_base = m5c
  modified_base 294: mod_base = m5c
  variation 150: note = CpG site, residue is C if methylated or T(=U) if unmethylated
agttttaacggtggttagcgtttgaaggtagagtaaggatttagggtgtttaggagttttattcggagttttttttggatttaagtttgagtcgtaatttttattttttggtataaagttggaggcggcgtttttttaaaagcgcgtttygaagtttcgcggggtgttttttcggttttttcgtttgagttagtttagttgcggatttattttatttaggtttggtagtcgatttttttttttttttttttcgtttttttttagtttttttttttttttttattgcgcgttagcgttttt

SEQ ID NO: 509 - DNA, 300 bp, synthetic construct
  source 1..300: mol_type = other DNA
  modified_base 4: mod_base = OTHER; note = uracil
  modified_base 10..11: mod_base = OTHER; note = uracil
  modified_base 13: mod_base = OTHER; note = uracil
  modified_base 17..19: mod_base = OTHER; note = uracil
  modified_base 34: mod_base = OTHER; note = uracil
  modified_base 38: mod_base = OTHER; note = uracil
  modified_base 43..44: mod_base = OTHER; note = uracil
  modified_base 46: mod_base = OTHER; note = uracil
  modified_base 48..50: mod_base = OTHER; note = uracil
  modified_base 52: mod_base = OTHER; note = uracil
  modified_base 56..57: mod_base = OTHER; note = uracil
  modified_base 65: mod_base = OTHER; note = uracil
  modified_base 67..69: mod_base = OTHER; note = uracil
  modified_base 71..73: mod_base = OTHER; note = uracil
  modified_base 78: mod_base = OTHER; note = uracil
  modified_base 80..81: mod_base = OTHER; note = uracil
  modified_base 83: mod_base = OTHER; note = uracil
  modified_base 92: mod_base = OTHER; note = uracil
  modified_base 95..98: mod_base = OTHER; note = uracil
  modified_base 105..106: mod_base = OTHER; note = uracil
  modified_base 118: mod_base = OTHER; note = uracil
  modified_base 126: mod_base = OTHER; note = uracil
  modified_base 128..131: mod_base = OTHER; note = uracil
  modified_base 133: mod_base = OTHER; note = uracil
  modified_base 135..137: mod_base = OTHER; note = uracil
  modified_base 148: mod_base = OTHER; note = uracil
  modified_base 152..153: mod_base = OTHER; note = uracil
  modified_base 157: mod_base = OTHER; note = uracil
  modified_base 161..162: mod_base = OTHER; note = uracil
  modified_base 165..167: mod_base = OTHER; note = uracil
  modified_base 169..170: mod_base = OTHER; note = uracil
  modified_base 177..178: mod_base = OTHER; note = uracil
  modified_base 183: mod_base = OTHER; note = uracil
  modified_base 191: mod_base = OTHER; note = uracil
  modified_base 194: mod_base = OTHER; note = uracil
  modified_base 198: mod_base = OTHER; note = uracil
  modified_base 200: mod_base = OTHER; note = uracil
  modified_base 203: mod_base = OTHER; note = uracil
  modified_base 210: mod_base = OTHER; note = uracil
  modified_base 216..218: mod_base = OTHER; note = uracil
  modified_base 227: mod_base = OTHER; note = uracil
  modified_base 233: mod_base = OTHER; note = uracil
  modified_base 236..237: mod_base = OTHER; note = uracil
  modified_base 239..240: mod_base = OTHER; note = uracil
  modified_base 244: mod_base = OTHER; note = uracil
  modified_base 257: mod_base = OTHER; note = uracil
  modified_base 264: mod_base = OTHER; note = uracil
  modified_base 269..270: mod_base = OTHER; note = uracil
  modified_base 275: mod_base = OTHER; note = uracil
  modified_base 278: mod_base = OTHER; note = uracil
  modified_base 281: mod_base = OTHER; note = uracil
  modified_base 283..284: mod_base = OTHER; note = uracil
  modified_base 286: mod_base = OTHER; note = uracil
  modified_base 289: mod_base = OTHER; note = uracil
  modified_base 291..294: mod_base = OTHER; note = uracil
  modified_base 296: mod_base = OTHER; note = uracil
  modified_base 74: mod_base = m5c
  modified_base 138: mod_base = m5c
  modified_base 163: mod_base = m5c
  modified_base 171: mod_base = m5c
  modified_base 195: mod_base = m5c
  modified_base 229: mod_base = m5c
  modified_base 261: mod_base = m5c
  modified_base 265: mod_base = m5c
  modified_base 279: mod_base = m5c
  modified_base 297: mod_base = m5c
  variation 149: note = CpG site, residue is C if methylated or T(=U) if unmethylated
tattagaatttatatatttaggtgggtttaggattttttaggttttttttttaggttataggagtatttatttcgggtttttttggaggggtagttttaaggaatttgttggggtaatttgtttgttttttatatttcgggaatgtgtygtttttttaggttcgtttattcggatttttgtgtagggagttagtcgatatagtatgttgtatgtgttttgtggggatacgttttgttttttgttagggggaggaggttggcggtcgtgtttgtgttgtcgtattttagttttttatcgaa

SEQ ID NO: 510 - DNA, 300 bp, synthetic construct
  source 1..300: mol_type = other DNA
  modified_base 12: mod_base = OTHER; note = uracil
  modified_base 23: mod_base = OTHER; note = uracil
  modified_base 26: mod_base = OTHER; note = uracil
  modified_base 28: mod_base = OTHER; note = uracil
  modified_base 32: mod_base = OTHER; note = uracil
  modified_base 37: mod_base = OTHER; note = uracil
  modified_base 40..41: mod_base = OTHER; note = uracil
  modified_base 44..45: mod_base = OTHER; note = uracil
  modified_base 47..48: mod_base = OTHER; note = uracil
  modified_base 50..54: mod_base = OTHER; note = uracil
  modified_base 58: mod_base = OTHER; note = uracil
  modified_base 65: mod_base = OTHER; note = uracil
  modified_base 75..78: mod_base = OTHER; note = uracil
  modified_base 80: mod_base = OTHER; note = uracil
  modified_base 85: mod_base = OTHER; note = uracil
  modified_base 87: mod_base = OTHER; note = uracil
  modified_base 91: mod_base = OTHER; note = uracil
  modified_base 94: mod_base = OTHER; note = uracil
  modified_base 98: mod_base = OTHER; note = uracil
  modified_base 107: mod_base = OTHER; note = uracil
  modified_base 111: mod_base = OTHER; note = uracil
  modified_base 113..115: mod_base = OTHER; note = uracil
  modified_base 118: mod_base = OTHER; note = uracil
  modified_base 120: mod_base = OTHER; note = uracil
  modified_base 127: mod_base = OTHER; note = uracil
  modified_base 140..141: mod_base = OTHER; note = uracil
  modified_base 153: mod_base = OTHER; note = uracil
  modified_base 155: mod_base = OTHER; note = uracil
  modified_base 159..160: mod_base = OTHER; note = uracil
  modified_base 175: mod_base = OTHER; note = uracil
  modified_base 179: mod_base = OTHER; note = uracil
  modified_base 186..189: mod_base = OTHER; note = uracil
  modified_base 192: mod_base = OTHER; note = uracil
  modified_base 198..199: mod_base = OTHER; note = uracil
  modified_base 206: mod_base = OTHER; note = uracil
  modified_base 209..212: mod_base = OTHER; note = uracil
  modified_base 214..215: mod_base = OTHER; note = uracil
  modified_base 223..224: mod_base = OTHER; note = uracil
  modified_base 236: mod_base = OTHER; note = uracil
  modified_base 238..239: mod_base = OTHER; note = uracil
  modified_base 245..246: mod_base = OTHER; note = uracil
  modified_base 258..259: mod_base = OTHER; note = uracil
  modified_base 268..269: mod_base = OTHER; note = uracil
  modified_base 274..276: mod_base = OTHER; note = uracil
  modified_base 278..279: mod_base = OTHER; note = uracil
  modified_base 294: mod_base = OTHER; note = uracil
  modified_base 300: mod_base = OTHER; note = uracil
  modified_base 2: mod_base = m5c
  modified_base 20: mod_base = m5c
  modified_base 34: mod_base = m5c
  modified_base 38: mod_base = m5c
  modified_base 70: mod_base = m5c
  modified_base 104: mod_base = m5c
  modified_base 128: mod_base = m5c
  modified_base 136: mod_base = m5c
  modified_base 161: mod_base = m5c
  modified_base 225: mod_base = m5c
  variation 150: note = CpG site, residue is C if methylated or T(=U) if unmethylated
tcggtggggagttgaggtgcggtagtataggtacggtcgttagttttttttttttgataggaggtagaacgtgtttttatagggtatatgtaatatgttgtgtcggttgattttttgtataggaattcgggtgggcgggtttgaaaggayggtatattttcggggtgtggggagtaaataagttattttaataggttttttggggttgtttttttagaggagttcggggtgggtgtttttatggtttgagggagaggtttagaaagttttaaatttatttgggtatgtggattttgatat

SEQ ID NO: 511 - DNA, 300 bp, synthetic construct
  source 1..300: mol_type = other DNA
  modified_base 14: mod_base = OTHER; note = uracil
  modified_base 16: mod_base = OTHER; note = uracil
  modified_base 18..20: mod_base = OTHER; note = uracil
  modified_base 25: mod_base = OTHER; note = uracil
  modified_base 29: mod_base = OTHER; note = uracil
  modified_base 31: mod_base = OTHER; note = uracil
  modified_base 37..38: mod_base = OTHER; note = uracil
  modified_base 40: mod_base = OTHER; note = uracil
  modified_base 51: mod_base = OTHER; note = uracil
  modified_base 57: mod_base = OTHER; note = uracil
  modified_base 61: mod_base = OTHER; note = uracil
  modified_base 64..65: mod_base = OTHER; note = uracil
  modified_base 67: mod_base = OTHER; note = uracil
  modified_base 81..82: mod_base = OTHER; note = uracil
  modified_base 85: mod_base = OTHER; note = uracil
  modified_base 89: mod_base = OTHER; note = uracil
  modified_base 93..94: mod_base = OTHER; note = uracil
  modified_base 96: mod_base = OTHER; note = uracil
  modified_base 102: mod_base = OTHER; note = uracil
  modified_base 104: mod_base = OTHER; note = uracil
  modified_base 116: mod_base = OTHER; note = uracil
  modified_base 120: mod_base = OTHER; note = uracil
  modified_base 132: mod_base = OTHER; note = uracil
  modified_base 136: mod_base = OTHER; note = uracil
  modified_base 145..147: mod_base = OTHER; note = uracil
  modified_base 154..156: mod_base = OTHER; note = uracil
  modified_base 163: mod_base = OTHER; note = uracil
  modified_base 165: mod_base = OTHER; note = uracil
  modified_base 170..171: mod_base = OTHER; note = uracil
  modified_base 175: mod_base = OTHER; note = uracil
  modified_base 193: mod_base = OTHER; note = uracil
  modified_base 199: mod_base = OTHER; note = uracil
  modified_base 205: mod_base = OTHER; note = uracil
  modified_base 208: mod_base = OTHER; note = uracil
  modified_base 220: mod_base = OTHER; note = uracil
  modified_base 228: mod_base = OTHER; note = uracil
  modified_base 231..232: mod_base = OTHER; note = uracil
  modified_base 244: mod_base = OTHER; note = uracil
  modified_base 246: mod_base = OTHER; note = uracil
  modified_base 251: mod_base = OTHER; note = uracil
  modified_base 254: mod_base = OTHER; note = uracil
  modified_base 256: mod_base = OTHER; note = uracil
  modified_base 260: mod_base = OTHER; note = uracil
  modified_base 262: mod_base = OTHER; note = uracil
  modified_base 267: mod_base = OTHER; note = uracil
  modified_base 275: mod_base = OTHER; note = uracil
  modified_base 288..289: mod_base = OTHER; note = uracil
  modified_base 297..299: mod_base = OTHER; note = uracil
  modified_base 49: mod_base = m5c
  modified_base 114: mod_base = m5c
  modified_base 117: mod_base = m5c
  modified_base 137: mod_base = m5c
  modified_base 157: mod_base = m5c
  modified_base 277: mod_base = m5c
  variation 150: note = CpG site, residue is C if methylated or T(=U) if unmethylated
agaggatttaagatttatttagggtaaatattgggattattgtaagagcgttggaatattttgttttttgagtgaaggggttttttttttagtttttatggtattgaggggtgcgtcggttggtggaggagtagttcgatggagttttgygtttttcggggatatagggttaagttttgaggtggaaagtttttggttttgaaataataaggagagagtttgtttttttttttaaaatttggatttttgtttgtataaattttggtttgttttgtacggtttgtgtgttttttttttttt

SEQ ID NO: 512 - DNA, 300 bp, synthetic construct
  source 1..300: mol_type = other DNA
  modified_base 13: mod_base = OTHER; note = uracil
  modified_base 15: mod_base = OTHER; note = uracil
  modified_base 17: mod_base = OTHER; note = uracil
  modified_base 21: mod_base = OTHER; note = uracil
  modified_base 26: mod_base = OTHER; note = uracil
  modified_base 31: mod_base = OTHER; note = uracil
  modified_base 35..36: mod_base = OTHER; note = uracil
  modified_base 47: mod_base = OTHER; note = uracil
  modified_base 51: mod_base = OTHER; note = uracil
  modified_base 58..59: mod_base = OTHER; note = uracil
  modified_base 78: mod_base = OTHER; note = uracil
  modified_base 82: mod_base = OTHER; note = uracil
  modified_base 84: mod_base = OTHER; note = uracil
  modified_base 86: mod_base = OTHER; note = uracil
  modified_base 88..89: mod_base = OTHER; note = uracil
  modified_base 99: mod_base = OTHER; note = uracil
  modified_base 104..105: mod_base = OTHER; note = uracil
  modified_base 111: mod_base = OTHER; note = uracil
  modified_base 115..116: mod_base = OTHER; note = uracil
  modified_base 118..119: mod_base = OTHER; note = uracil
  modified_base 121: mod_base = OTHER; note = uracil
  modified_base 126: mod_base = OTHER; note = uracil
  modified_base 131..133: mod_base = OTHER; note = uracil
  modified_base 139..141: mod_base = OTHER; note = uracil
  modified_base 151: mod_base = OTHER; note = uracil
  modified_base 156: mod_base = OTHER; note = uracil
  modified_base 158..159: mod_base = OTHER; note = uracil
  modified_base 166: mod_base = OTHER; note = uracil
  modified_base 169: mod_base = OTHER; note = uracil
  modified_base 171..172: mod_base = OTHER; note = uracil
  modified_base 174..175: mod_base = OTHER; note = uracil
  modified_base 177..178: mod_base = OTHER; note = uracil
  modified_base 181: mod_base = OTHER; note = uracil
  modified_base 187: mod_base = OTHER; note = uracil
  modified_base 189..192: mod_base = OTHER; note = uracil
  modified_base 194: mod_base = OTHER; note = uracil
  modified_base 199..200: mod_base = OTHER; note = uracil
  modified_base 208: mod_base = OTHER; note = uracil
  modified_base 220..223: mod_base = OTHER; note = uracil
  modified_base 226: mod_base = OTHER; note = uracil
  modified_base 228: mod_base = OTHER; note = uracil
  modified_base 230: mod_base = OTHER; note = uracil
  modified_base 237: mod_base = OTHER; note = uracil
  modified_base 246..247: mod_base = OTHER; note = uracil
  modified_base 252: mod_base = OTHER; note = uracil
  modified_base 254: mod_base = OTHER; note = uracil
  modified_base 258: mod_base = OTHER; note = uracil
  modified_base 265..267: mod_base = OTHER; note = uracil
  modified_base 276..278: mod_base = OTHER; note = uracil
  modified_base 288: mod_base = OTHER; note = uracil
  modified_base 295..296: mod_base = OTHER; note = uracil
  modified_base 298: mod_base = OTHER; note = uracil
  modified_base 22: mod_base = m5c
  modified_base 142: mod_base = m5c
  modified_base 162: mod_base = m5c
  modified_base 182: mod_base = m5c
  modified_base 185: mod_base = m5c
  modified_base 250: mod_base = m5c
  variation 149: note = CpG site, residue is C if methylated or T(=U) if unmethylated
gggaaaaaaaggtatataaatcgtgtaaaatagattagagtttgtgtagataagagtttaaattttaggaagaaaaatagattttttttttgttgttttagaattagaaattttttattttaaagtttggttttgtgttttcggggaaygtagggttttatcggattgtttttttattagtcggcgtattttttagtgttatagaggttagaaagaaggtttttttatttaagaggtagaatgttttagcgtttttatagtggttttagtgtttgttttgggtgagttttaaattttttt

SEQ ID NO: 513 - DNA, 300 bp, synthetic construct
  source 1..300: mol_type = other DNA
  modified_base 3..4: mod_base = OTHER; note = uracil
  modified_base 6: mod_base = OTHER; note = uracil
  modified_base 12: mod_base = OTHER; note = uracil
  modified_base 21: mod_base = OTHER; note = uracil
  modified_base 27..28: mod_base = OTHER; note = uracil
  modified_base 35: mod_base = OTHER; note = uracil
  modified_base 37: mod_base = OTHER; note = uracil
  modified_base 42..43: mod_base = OTHER; note = uracil
  modified_base 50: mod_base = OTHER; note = uracil
  modified_base 56: mod_base = OTHER; note = uracil
  modified_base 61..62: mod_base = OTHER; note = uracil
  modified_base 64: mod_base = OTHER; note = uracil
  modified_base 66..67: mod_base = OTHER; note = uracil
  modified_base 71..72: mod_base = OTHER; note = uracil
  modified_base 83..84: mod_base = OTHER; note = uracil
  modified_base 89: mod_base = OTHER; note = uracil
  modified_base 96: mod_base = OTHER; note = uracil
  modified_base 100: mod_base = OTHER; note = uracil
  modified_base 102: mod_base = OTHER; note = uracil
  modified_base 104: mod_base = OTHER; note = uracil
  modified_base 107: mod_base = OTHER; note = uracil
  modified_base 110: mod_base = OTHER; note = uracil
  modified_base 126: mod_base = OTHER; note = uracil
  modified_base 130: mod_base = OTHER; note = uracil
  modified_base 137: mod_base = OTHER; note = uracil
  modified_base 142: mod_base = OTHER; note = uracil
  modified_base 148: mod_base = OTHER; note = uracil
  modified_base 154..156: mod_base = OTHER; note = uracil
  modified_base 164..165: mod_base = OTHER; note = uracil
  modified_base 167: mod_base = OTHER; note = uracil
  modified_base 172: mod_base = OTHER; note = uracil
  modified_base 178..179: mod_base = OTHER; note = uracil
  modified_base 184..186: mod_base = OTHER; note = uracil
  modified_base 188: mod_base = OTHER; note = uracil
  modified_base 190..191: mod_base = OTHER; note = uracil
  modified_base 193: mod_base = OTHER; note = uracil
  modified_base 196: mod_base = OTHER; note = uracil
  modified_base 198: mod_base = OTHER; note = uracil
  modified_base 204: mod_base = OTHER; note = uracil
  modified_base 219..221: mod_base = OTHER; note = uracil
  modified_base 225: mod_base = OTHER; note = uracil
  modified_base 230: mod_base = OTHER; note = uracil
  modified_base 246..247: mod_base = OTHER; note = uracil
  modified_base 251..252: mod_base = OTHER; note = uracil
  modified_base 257..258: mod_base = OTHER; note = uracil
  modified_base 263: mod_base = OTHER; note = uracil
  modified_base 265..266: mod_base = OTHER; note = uracil
  modified_base 272: mod_base = OTHER; note = uracil
  modified_base 277: mod_base = OTHER; note = uracil
  modified_base 289..290: mod_base = OTHER; note = uracil
  modified_base 292..293: mod_base = OTHER; note = uracil
  modified_base 296: mod_base = OTHER; note = uracil
  modified_base 298..299: mod_base = OTHER; note = uracil
  modified_base 18: mod_base = m5c
  modified_base 115: mod_base = m5c
  modified_base 118: mod_base = m5c
  modified_base 133: mod_base = m5c
  modified_base 139: mod_base = m5c
  modified_base 143: mod_base = m5c
  modified_base 199: mod_base = m5c
  modified_base 270: mod_base = m5c
  variation 151: note = CpG site, residue is C if methylated or T(=U) if unmethylated
tgtttttgagtttaaaacggtagtggtttaggagtatagggtttgggggtaggggtagtgttatatttaatttgagatatgtttagagttgaggtttagtttatagtatttgtgcgtcggggaagttggttgcggttacggtcggtgtagyggtttaaggagtttataaagtagtaattttggtttatattatagtttcggtgtatttggagagggggtttagtttaggttgaagttggggggagtttggttagggtttgggtattaggcgtaggatagagggaaaggtttttagttttt

SEQ ID NO: 514 - DNA, 300 bp, synthetic construct
  source 1..300: mol_type = other DNA
  modified_base 6: mod_base = OTHER; note = uracil
  modified_base 13..14: mod_base = OTHER; note = uracil
  modified_base 18..20: mod_base = OTHER; note = uracil
  modified_base 22: mod_base = OTHER; note = uracil
  modified_base 26..27: mod_base = OTHER; note = uracil
  modified_base 32..33: mod_base = OTHER; note = uracil
  modified_base 39..41: mod_base = OTHER; note = uracil
  modified_base 45..47: mod_base = OTHER; note = uracil
  modified_base 51..52: mod_base = OTHER; note = uracil
  modified_base 56: mod_base = OTHER; note = uracil
  modified_base 58..63: mod_base = OTHER; note = uracil
  modified_base 66: mod_base = OTHER; note = uracil
  modified_base 69: mod_base = OTHER; note = uracil
  modified_base 72..73: mod_base = OTHER; note = uracil
  modified_base 78: mod_base = OTHER; note = uracil
  modified_base 83..87: mod_base = OTHER; note = uracil
  modified_base 89: mod_base = OTHER; note = uracil
  modified_base 91..92: mod_base = OTHER; note = uracil
  modified_base 98: mod_base = OTHER; note = uracil
  modified_base 100: mod_base = OTHER; note = uracil
  modified_base 106: mod_base = OTHER; note = uracil
  modified_base 118..119: mod_base = OTHER; note = uracil
  modified_base 127: mod_base = OTHER; note = uracil
  modified_base 130: mod_base = OTHER; note = uracil
  modified_base 139: mod_base = OTHER; note = uracil
  modified_base 141..142: mod_base = OTHER; note = uracil
  modified_base 148: mod_base = OTHER; note = uracil
  modified_base 151: mod_base = OTHER; note = uracil
  modified_base 154: mod_base = OTHER; note = uracil
  modified_base 156: mod_base = OTHER; note = uracil
  modified_base 160: mod_base = OTHER; note = uracil
  modified_base 166: mod_base = OTHER; note = uracil
  modified_base 169: mod_base = OTHER; note = uracil
  modified_base 172..173: mod_base = OTHER; note = uracil
  modified_base 176: mod_base = OTHER; note = uracil
  modified_base 179..181: mod_base = OTHER; note = uracil
  modified_base 187: mod_base = OTHER; note = uracil
  modified_base 189: mod_base = OTHER; note = uracil
  modified_base 195: mod_base = OTHER; note = uracil
  modified_base 202: mod_base = OTHER; note = uracil
  modified_base 207..208: mod_base = OTHER; note = uracil
  modified_base 210: mod_base = OTHER; note = uracil
  modified_base 213: mod_base = OTHER; note = uracil
  modified_base 215: mod_base = OTHER; note = uracil
  modified_base 220: mod_base = OTHER; note = uracil
  modified_base 225: mod_base = OTHER; note = uracil
  modified_base 227: mod_base = OTHER; note = uracil
  modified_base 241: mod_base = OTHER; note = uracil
  modified_base 243: mod_base = OTHER; note = uracil
  modified_base 246..249: mod_base = OTHER; note = uracil
  modified_base 252..256: mod_base = OTHER; note = uracil
  modified_base 260..262: mod_base = OTHER; note = uracil
  modified_base 267: mod_base = OTHER; note = uracil
  modified_base 269..270: mod_base = OTHER; note = uracil
  modified_base 275..276: mod_base = OTHER; note = uracil
  modified_base 278: mod_base = OTHER; note = uracil
  modified_base 281: mod_base = OTHER; note = uracil
  modified_base 291: mod_base = OTHER; note = uracil
  modified_base 293: mod_base = OTHER; note = uracil
  modified_base 299: mod_base = OTHER; note = uracil
  modified_base 30: mod_base = m5c
  modified_base 101: mod_base = m5c
  modified_base 157: mod_base = m5c
  modified_base 161: mod_base = m5c
  modified_base 167: mod_base = m5c
  modified_base 182: mod_base = m5c
  modified_base 185: mod_base = m5c
  modified_base 282: mod_base = m5c
  variation 149: note = CpG site, residue is C if methylated or T(=U) if unmethylated
aggagttggaggtttttttttttgttttgcgtttggtgtttaggttttggttaggttttttttaattttagtttagattgggttttttttttaaatgtatcggagttgtggtgtgggttaaggttattgttttgtggattttttgggtygttgtatcggtcgtgatcgtagttagttttttcgacgtatagatgttgtgagttagattttagttttggatatattttaggttaggtgtggtattgtttttgtttttaggttttgtgtttttaggttattgtcgttttagatttagaggta

SEQ ID NO: 515 - DNA, 300 bp, synthetic construct
  source 1..300: mol_type = other DNA
  modified_base 2: mod_base = OTHER; note = uracil
  modified_base 5..7: mod_base = OTHER; note = uracil
  modified_base 25: mod_base = OTHER; note = uracil
  modified_base 31..32: mod_base = OTHER; note = uracil
  modified_base 35: mod_base = OTHER; note = uracil
  modified_base 38..41: mod_base = OTHER; note = uracil
  modified_base 47: mod_base = OTHER; note = uracil
  modified_base 50..51: mod_base = OTHER; note = uracil
  modified_base 53..54: mod_base = OTHER; note = uracil
  modified_base 57..58: mod_base = OTHER; note = uracil
  modified_base 63: mod_base = OTHER; note = uracil
  modified_base 66..67: mod_base = OTHER; note = uracil
  modified_base 70..71: mod_base = OTHER; note = uracil
  modified_base 73: mod_base = OTHER; note = uracil
  modified_base 81: mod_base = OTHER; note = uracil
  modified_base 84..85: mod_base = OTHER; note = uracil
  modified_base 88..89: mod_base = OTHER; note = uracil
  modified_base 92..94: mod_base = OTHER; note = uracil
  modified_base 96: mod_base = OTHER; note = uracil
  modified_base 104..105: mod_base = OTHER; note = uracil
  modified_base 108: mod_base = OTHER; note = uracil
  modified_base 112..114: mod_base = OTHER; note = uracil
  modified_base 116: mod_base = OTHER; note = uracil
  modified_base 125: mod_base = OTHER; note = uracil
  modified_base 129: mod_base = OTHER; note = uracil
  modified_base 158: mod_base = OTHER; note = uracil
  modified_base 161: mod_base = OTHER; note = uracil
  modified_base 164..166: mod_base = OTHER; note = uracil
  modified_base 168: mod_base = OTHER; note = uracil
  modified_base 174..175: mod_base = OTHER; note = uracil
  modified_base 177: mod_base = OTHER; note = uracil
  modified_base 182: mod_base = OTHER; note = uracil
  modified_base 188..189: mod_base = OTHER; note = uracil
  modified_base 193..196: mod_base = OTHER; note = uracil
  modified_base 198: mod_base = OTHER; note = uracil
  modified_base 201: mod_base = OTHER; note = uracil
  modified_base 203: mod_base = OTHER; note = uracil
  modified_base 206..207: mod_base = OTHER; note = uracil
  modified_base 211..212: mod_base = OTHER; note = uracil
  modified_base 215..216: mod_base = OTHER; note = uracil
  modified_base 220..221: mod_base = OTHER; note = uracil
  modified_base 223..224: mod_base = OTHER; note = uracil
  modified_base 227: mod_base = OTHER; note = uracil
  modified_base 234: mod_base = OTHER; note = uracil
  modified_base 240..242: mod_base = OTHER; note = uracil
  modified_base 250..252: mod_base = OTHER; note = uracil
  modified_base 256: mod_base = OTHER; note = uracil
  modified_base 259: mod_base = OTHER; note = uracil
  modified_base 262..266: mod_base = OTHER; note = uracil
  modified_base 270..271: mod_base = OTHER; note = uracil
  modified_base 273..276: mod_base = OTHER; note = uracil
  modified_base 279..281: mod_base = OTHER; note = uracil
  modified_base 286: mod_base = OTHER; note = uracil
  modified_base 288: mod_base = OTHER; note = uracil
  modified_base 291: mod_base = OTHER; note = uracil
  modified_base 293: mod_base = OTHER; note = uracil
  modified_base 296: mod_base = OTHER; note = uracil
  modified_base 13: mod_base = m5c
  modified_base 22: mod_base = m5c
  modified_base 59: mod_base = m5c
  modified_base 97: mod_base = m5c
  modified_base 120: mod_base = m5c
  modified_base 178: mod_base = m5c
  modified_base 284: mod_base = m5c
  variation 149: note = CpG site, residue is C if methylated or T(=U) if unmethylated
gtagttttggggcgtggggggcggttgttttttgttgttttttgggttgttatttgttcgagttgttagttatagttggatttttttttagtttttcggggtgtttgtatttttatattcgagataggtagtgagagggagtgaggggygatgatgtttgtagtttataagagttttcgggtagtagttaggtttttttgtttagtttgatttgtttggtttttagtagggtgttatggttttgggaggttttggtttttgttttttttttttttttgttttgcgttttgttttgttgtg

SEQ ID NO: 516 - DNA, 300 bp, synthetic construct
  source 1..300: mol_type = other DNA
  modified_base 2: mod_base = OTHER; note = uracil
  modified_base 5: mod_base = OTHER; note = uracil
  modified_base 10: mod_base = OTHER; note = uracil
  modified_base 17: mod_base = OTHER; note = uracil
  modified_base 22: mod_base = OTHER; note = uracil
  modified_base 39: mod_base = OTHER; note = uracil
  modified_base 45..46: mod_base = OTHER; note = uracil
  modified_base 51..52: mod_base = OTHER; note = uracil
  modified_base 54..56: mod_base = OTHER; note = uracil
  modified_base 61..62: mod_base = OTHER; note = uracil
  modified_base 67: mod_base = OTHER; note = uracil
  modified_base 69..71: mod_base = OTHER; note = uracil
  modified_base 74: mod_base = OTHER; note = uracil
  modified_base 81..82: mod_base = OTHER; note = uracil
  modified_base 86: mod_base = OTHER; note = uracil
  modified_base 91: mod_base = OTHER; note = uracil
  modified_base 95: mod_base = OTHER; note = uracil
  modified_base 100: mod_base = OTHER; note = uracil
  modified_base 108..109: mod_base = OTHER; note = uracil
  modified_base 113: mod_base = OTHER; note = uracil
  modified_base 116: mod_base = OTHER; note = uracil
  modified_base 119..120: mod_base = OTHER; note = uracil
  modified_base 127: mod_base = OTHER; note = uracil
  modified_base 129: mod_base = OTHER; note = uracil
  modified_base 137: mod_base = OTHER; note = uracil
  modified_base 140: mod_base = OTHER; note = uracil
  modified_base 144: mod_base = OTHER; note = uracil
  modified_base 147: mod_base = OTHER; note = uracil
  modified_base 152..155: mod_base = OTHER; note = uracil
  modified_base 157: mod_base = OTHER; note = uracil
  modified_base 159: mod_base = OTHER; note = uracil
  modified_base 161..163: mod_base = OTHER; note = uracil
  modified_base 165: mod_base = OTHER; note = uracil
  modified_base 167: mod_base = OTHER; note = uracil
  modified_base 169: mod_base = OTHER; note = uracil
  modified_base 172..173: mod_base = OTHER; note = uracil
  modified_base 177: mod_base = OTHER; note = uracil
  modified_base 193: mod_base = OTHER; note = uracil
  modified_base 197: mod_base = OTHER; note = uracil
  modified_base 199..201: mod_base = OTHER; note = uracil
  modified_base 209: mod_base = OTHER; note = uracil
  modified_base 221..222: mod_base = OTHER; note = uracil
  modified_base 225: mod_base = OTHER; note = uracil
  modified_base 231: mod_base = OTHER; note = uracil
  modified_base 235: mod_base = OTHER; note = uracil
  modified_base 238: mod_base = OTHER; note = uracil
  modified_base 244: mod_base = OTHER; note = uracil
  modified_base 251: mod_base = OTHER; note = uracil
  modified_base 254..256: mod_base = OTHER; note = uracil
  modified_base 263: mod_base = OTHER; note = uracil
  modified_base 266: mod_base = OTHER; note = uracil
  modified_base 273: mod_base = OTHER; note = uracil
  modified_base 276: mod_base = OTHER; note = uracil
  modified_base 279..284: mod_base = OTHER; note = uracil
  modified_base 288..291: mod_base = OTHER; note = uracil
  modified_base 296: mod_base = OTHER; note = uracil
  modified_base 299..300: mod_base = OTHER; note = uracil
  modified_base 15: mod_base = m5c
  modified_base 121: mod_base = m5c
  modified_base 179: mod_base = m5c
  modified_base 202: mod_base = m5c
  modified_base 240: mod_base = m5c
  modified_base 277: mod_base = m5c
  modified_base 286: mod_base = m5c
  variation 150: note = CpG site, residue is C if methylated or T(=U) if unmethylated
atagtagagtagagcgtagggtaggggaggaaagggggtagaagttagggttttttagggttatagtattttgttggaggttaggtaggttaggttgagtagaggggtttggttattgttcggaggtttttgtgggttgtagatattatygttttttatttttttttattgtttgtttcgaatgtgggaatgtaggtatttcggagggttggaaggaagtttaattgtggttggtagttcgggtaggtggtagtttaaggggtagtaggaaatagtcgttttttacgttttagggttgtt

SEQ ID NO: 517 - DNA, 300 bp, synthetic construct
  source 1..300: mol_type = other DNA
  modified_base 2: mod_base = OTHER; note = uracil
  modified_base 4: mod_base = OTHER; note = uracil
  modified_base 6..7: mod_base = OTHER; note = uracil
  modified_base 12..13: mod_base = OTHER; note = uracil
  modified_base 17: mod_base = OTHER; note = uracil
  modified_base 28..30: mod_base = OTHER; note = uracil
  modified_base 33..34: mod_base = OTHER; note = uracil
  modified_base 40: mod_base = OTHER; note = uracil
  modified_base 50: mod_base = OTHER; note = uracil
  modified_base 54: mod_base = OTHER; note = uracil
  modified_base 59: mod_base = OTHER; note = uracil
  modified_base 65: mod_base = OTHER; note = uracil
  modified_base 69: mod_base = OTHER; note = uracil
  modified_base 71: mod_base = OTHER; note = uracil
  modified_base 79: mod_base = OTHER; note = uracil
  modified_base 83..84: mod_base = OTHER; note = uracil
  modified_base 91: mod_base = OTHER; note = uracil
  modified_base 100: mod_base = OTHER; note = uracil
  modified_base 104: mod_base = OTHER; note = uracil
  modified_base 107: mod_base = OTHER; note = uracil
  modified_base 121: mod_base = OTHER; note = uracil
  modified_base 132..133: mod_base = OTHER; note = uracil
  modified_base 139: mod_base = OTHER; note = uracil
  modified_base 141: mod_base = OTHER; note = uracil
  modified_base 143: mod_base = OTHER; note = uracil
  modified_base 147..149: mod_base = OTHER; note = uracil
  modified_base 160: mod_base = OTHER; note = uracil
  modified_base 163: mod_base = OTHER; note = uracil
  modified_base 165: mod_base = OTHER; note = uracil
  modified_base 168: mod_base = OTHER; note = uracil
  modified_base 174: mod_base = OTHER; note = uracil
  modified_base 178: mod_base = OTHER; note = uracil
  modified_base 180: mod_base = OTHER; note = uracil
  modified_base 183: mod_base = OTHER; note = uracil
  modified_base 186: mod_base = OTHER; note = uracil
  modified_base 197: mod_base = OTHER; note = uracil
  modified_base 200: mod_base = OTHER; note = uracil
  modified_base 223: mod_base = OTHER; note = uracil
  modified_base 244..245: mod_base = OTHER; note = uracil
  modified_base 251: mod_base = OTHER; note = uracil
  modified_base 257..258: mod_base = OTHER; note = uracil
  modified_base 277..279: mod_base = OTHER; note = uracil
  modified_base 281..283: mod_base = OTHER; note = uracil
  modified_base 295: mod_base = OTHER; note = uracil
  modified_base 297: mod_base = OTHER; note = uracil
  modified_base 41: mod_base = m5c
  modified_base 43: mod_base = m5c
  modified_base 122: mod_base = m5c
  modified_base 166: mod_base = m5c
  modified_base 169: mod_base = m5c
  modified_base 226: mod_base = m5c
  modified_base 232: mod_base = m5c
  modified_base 273: mod_base = m5c
  modified_base 284: mod_base = m5c
  variation 151: note = CpG site, residue is C if methylated or T(=U) if unmethylated
ttttttttgggttaagttttgtggatgtttagtttggggtcgcggggagttggtaggttagtggtagatattggtgggtagatttagtgtttggtagaataggtattaaggaagtggtgatcggagggaagttaagtgtatttaaattttygggtgagttattatcgtcgggttttttatagttgttgaaagtgagtaatagtgatgaaggtttgtgagtttttgcgtgagcgagtgaatggattagtagtagtttttaggttgtggaagagcgtttttttttcgggatggggatatttg

SEQ ID NO: 518 - DNA, 300 bp, synthetic construct
  source 1..300: mol_type = other DNA
  modified_base 1: mod_base = OTHER; note = uracil
  modified_base 8..11: mod_base = OTHER; note = uracil
  modified_base 14..15: mod_base = OTHER; note = uracil
  modified_base 29: mod_base = OTHER; note = uracil
  modified_base 31: mod_base = OTHER; note = uracil
  modified_base 34..35: mod_base = OTHER; note = uracil
  modified_base 37: mod_base = OTHER; note = uracil
  modified_base 40..41: mod_base = OTHER; note = uracil
  modified_base 48: mod_base = OTHER; note = uracil
  modified_base 51: mod_base = OTHER; note = uracil
  modified_base 54: mod_base = OTHER; note = uracil
  modified_base 59..60: mod_base = OTHER; note = uracil
  modified_base 64: mod_base = OTHER; note = uracil
  modified_base 66: mod_base = OTHER; note = uracil
  modified_base 70: mod_base = OTHER; note = uracil
  modified_base 72: mod_base = OTHER; note = uracil
  modified_base 76: mod_base = OTHER; note = uracil
  modified_base 82: mod_base = OTHER; note = uracil
  modified_base 84: mod_base = OTHER; note = uracil
  modified_base 86: mod_base = OTHER; note = uracil
  modified_base 90..91: mod_base = OTHER; note = uracil
  modified_base 94: mod_base = OTHER; note = uracil
  modified_base 97: mod_base = OTHER; note = uracil
  modified_base 99: mod_base = OTHER; note = uracil
  modified_base 105: mod_base = OTHER; note = uracil
  modified_base 107: mod_base = OTHER; note = uracil
  modified_base 109: mod_base = OTHER; note = uracil
  modified_base 113: mod_base = OTHER; note = uracil
  modified_base 116: mod_base = OTHER; note = uracil
  modified_base 119: mod_base = OTHER; note = uracil
  modified_base 129..130: mod_base = OTHER; note = uracil
  modified_base 143: mod_base = OTHER; note = uracil
  modified_base 145: mod_base = OTHER; note = uracil
  modified_base 147..148: mod_base = OTHER; note = uracil
  modified_base 163: mod_base = OTHER; note = uracil
  modified_base 165: mod_base = OTHER; note = uracil
  modified_base 170: mod_base = OTHER; note = uracil
  modified_base 173..175: mod_base = OTHER; note = uracil
  modified_base 177: mod_base = OTHER; note = uracil
  modified_base 182: mod_base = OTHER; note = uracil
  modified_base 184..185: mod_base = OTHER; note = uracil
  modified_base 187: mod_base = OTHER; note = uracil
  modified_base 190..191: mod_base = OTHER; note = uracil
  modified_base 198..199: mod_base = OTHER; note = uracil
  modified_base 204: mod_base = OTHER; note = uracil
  modified_base 207..208: mod_base = OTHER; note = uracil
  modified_base 212: mod_base = OTHER; note = uracil
  modified_base 214: mod_base = OTHER; note = uracil
  modified_base 220: mod_base = OTHER; note = uracil
  modified_base 223..225: mod_base = OTHER; note = uracil
  modified_base 227..228: mod_base = OTHER; note = uracil
  modified_base 234: mod_base = OTHER; note = uracil
  modified_base 237..238: mod_base = OTHER; note = uracil
  modified_base 240: mod_base = OTHER; note = uracil
  modified_base 244..245: mod_base = OTHER; note = uracil
  modified_base 248..249: mod_base = OTHER; note = uracil
  modified_base 252: mod_base = OTHER; note = uracil
  modified_base 254..256: mod_base = OTHER; note = uracil
  modified_base 262..265: mod_base = OTHER; note = uracil
  modified_base 269: mod_base = OTHER; note = uracil
  modified_base 274: mod_base = OTHER; note = uracil
  modified_base 277..278: mod_base = OTHER; note = uracil
  modified_base 280: mod_base = OTHER; note = uracil
  modified_base 285: mod_base = OTHER; note = uracil
  modified_base 290..292: mod_base = OTHER; note = uracil
  modified_base 16: mod_base = m5c
  modified_base 27: mod_base = m5c
  modified_base 68: mod_base = m5c
  modified_base 74: mod_base = m5c
  modified_base 131: mod_base = m5c
  modified_base 134: mod_base = m5c
  modified_base 178: mod_base = m5c
  modified_base 257: mod_base = m5c
  modified_base 259: mod_base = m5c
  variation 149: note = CpG site, residue is C if methylated or T(=U) if unmethylated
taagtgtttttatttcggggagggaacgtttttttataatttggaaattgttattggtttatttattcgtttacgtagaaatttataaatttttattattgttgtttatttttagtagttgtgaaagattcggcggtgatgatttattygagggtttgagtgtatttggttttttttcggttattatttttttgatgtttgttttattagatattaggtttgtttattagtgtttgttattgatttgttagtttttcgcggttttaggttgggtatttataaagtttggtttaggagaga

SEQ ID NO: 519 - DNA, 300 bp, synthetic construct
  source 1..300: mol_type = other DNA
  modified_base 3: mod_base = OTHER; note = uracil
  modified_base 8: mod_base = OTHER; note = uracil
  modified_base 14: mod_base = OTHER; note = uracil
  modified_base 16..17: mod_base = OTHER; note = uracil
  modified_base 22: mod_base = OTHER; note = uracil
  modified_base 24: mod_base = OTHER; note = uracil
  modified_base 30: mod_base = OTHER; note = uracil
  modified_base 32..33: mod_base = OTHER; note = uracil
  modified_base 35..36: mod_base = OTHER; note = uracil
  modified_base 39..40: mod_base = OTHER; note = uracil
  modified_base 42: mod_base = OTHER; note = uracil
  modified_base 45..46: mod_base = OTHER; note = uracil
  modified_base 48..50: mod_base = OTHER; note = uracil
  modified_base 59..60: mod_base = OTHER; note = uracil
  modified_base 62..63: mod_base = OTHER; note = uracil
  modified_base 67..68: mod_base = OTHER; note = uracil
  modified_base 71..72: mod_base = OTHER; note = uracil
  modified_base 77..78: mod_base = OTHER; note = uracil
  modified_base 83..84: mod_base = OTHER; note = uracil
  modified_base 86..87: mod_base = OTHER; note = uracil
  modified_base 91: mod_base = OTHER; note = uracil
  modified_base 94: mod_base = OTHER; note = uracil
  modified_base 100..101: mod_base = OTHER; note = uracil
  modified_base 105..106: mod_base = OTHER; note = uracil
  modified_base 108..109: mod_base = OTHER; note = uracil
  modified_base 121: mod_base = OTHER; note = uracil
  modified_base 123: mod_base = OTHER; note = uracil
  modified_base 127: mod_base = OTHER; note = uracil
  modified_base 131: mod_base = OTHER; note = uracil
  modified_base 133: mod_base = OTHER; note = uracil
  modified_base 135: mod_base = OTHER; note = uracil
  modified_base 147: mod_base = OTHER; note = uracil
  modified_base 152..154: mod_base = OTHER; note = uracil
  modified_base 156..157: mod_base = OTHER; note = uracil
  modified_base 168: mod_base = OTHER; note = uracil
  modified_base 173: mod_base = OTHER; note = uracil
  modified_base 194: mod_base = OTHER; note = uracil
  modified_base 200: mod_base = OTHER; note = uracil
  modified_base 207: mod_base = OTHER; note = uracil
  modified_base 214: mod_base = OTHER; note = uracil
  modified_base 218: mod_base = OTHER; note = uracil
  modified_base 222..223: mod_base = OTHER; note = uracil
  modified_base 225: mod_base = OTHER; note = uracil
  modified_base 227..229: mod_base = OTHER; note = uracil
  modified_base 241: mod_base = OTHER; note = uracil
  modified_base 248: mod_base = OTHER; note = uracil
  modified_base 251..252: mod_base = OTHER; note = uracil
  modified_base 263: mod_base = OTHER; note = uracil
  modified_base 268: mod_base = OTHER; note = uracil
  modified_base 272: mod_base = OTHER; note = uracil
  modified_base 275: mod_base = OTHER; note = uracil
  modified_base 277: mod_base = OTHER; note = uracil
  modified_base 73: mod_base = m5c
  modified_base 215: mod_base = m5c
  variation 117: note = CpG site, residue is C if methylated or T(=U) if unmethylated
  variation 183: note = CpG site, residue is C if methylated or T(=U) if unmethylated
ggttggttttgaatttttgggtttaagagttttatttgttttagttttttaaagtgagttattaggtttattcggttttttttttttatgtttttgtggtttttttttttgtttagygagttttgatatttatttataggtaggaataaagttttttattggttagtttgggttgaggtgggygtgtgtgtttttgtattagtgatttgtttttcggtaggtttttttttgaggggagagttggtagtttttatgtaagtggtagggtatattttattaaataaaagatgtgtgggtgag

SEQ ID NO: 520 - DNA, 300 bp, synthetic construct
  source 1..300: mol_type = other DNA
  modified_base 1: mod_base = OTHER; note = uracil
  modified_base 3: mod_base = OTHER; note = uracil
  modified_base 5..7: mod_base = OTHER; note = uracil
  modified_base 9: mod_base = OTHER; note = uracil
  modified_base 11: mod_base = OTHER; note = uracil
  modified_base 14: mod_base = OTHER; note = uracil
  modified_base 34..36: mod_base = OTHER; note = uracil
  modified_base 39..40: mod_base = OTHER; note = uracil
  modified_base 42: mod_base = OTHER; note = uracil
  modified_base 46: mod_base = OTHER; note = uracil
  modified_base 54: mod_base = OTHER; note = uracil
  modified_base 57..58: mod_base = OTHER; note = uracil
  modified_base 61: mod_base = OTHER; note = uracil
  modified_base 63: mod_base = OTHER; note = uracil
  modified_base 65..68: mod_base = OTHER; note = uracil
  modified_base 70: mod_base = OTHER; note = uracil
  modified_base 80..81: mod_base = OTHER; note = uracil
  modified_base 84: mod_base = OTHER; note = uracil
  modified_base 92: mod_base = OTHER; note = uracil
  modified_base 97: mod_base = OTHER; note = uracil
  modified_base 99: mod_base = OTHER; note = uracil
  modified_base 105: mod_base = OTHER; note = uracil
  modified_base 111: mod_base = OTHER; note = uracil
  modified_base 113: mod_base = OTHER; note = uracil
  modified_base 115: mod_base = OTHER; note = uracil
  modified_base 119..121: mod_base = OTHER; note = uracil
  modified_base 123..124: mod_base = OTHER; note = uracil
  modified_base 126: mod_base = OTHER; note = uracil
  modified_base 129..131: mod_base = OTHER; note = uracil
  modified_base 135: mod_base = OTHER; note = uracil
  modified_base 139..140: mod_base = OTHER; note = uracil
  modified_base 150: mod_base = OTHER; note = uracil
  modified_base 157..158: mod_base = OTHER; note = uracil
  modified_base 161..162: mod_base = OTHER; note = uracil
  modified_base 176: mod_base = OTHER; note = uracil
  modified_base 181: mod_base = OTHER; note = uracil
  modified_base 185: mod_base = OTHER; note = uracil
  modified_base 190: mod_base = OTHER; note = uracil
  modified_base 202..203: mod_base = OTHER; note = uracil
  modified_base 205: mod_base = OTHER; note = uracil
  modified_base 211: mod_base = OTHER; note = uracil
  modified_base 226: mod_base = OTHER; note = uracil
  modified_base 235..236: mod_base = OTHER; note = uracil
  modified_base 243: mod_base = OTHER; note = uracil
  modified_base 245: mod_base = OTHER; note = uracil
  modified_base 247: mod_base = OTHER; note = uracil
  modified_base 257: mod_base = OTHER; note = uracil
  modified_base 263: mod_base = OTHER; note = uracil
  modified_base 272: mod_base = OTHER; note = uracil
  modified_base 274: mod_base = OTHER; note = uracil
  modified_base 280..282: mod_base = OTHER; note = uracil
  modified_base 290: mod_base = OTHER; note = uracil
  modified_base 295..296: mod_base = OTHER; note = uracil
  modified_base 299..300: mod_base = OTHER; note = uracil
  modified_base 85: mod_base = m5c
  modified_base 227: mod_base = m5c
  variation 117: note = CpG site, residue is C if methylated or T(=U) if unmethylated
  variation 183: note = CpG site, residue is C if methylated or T(=U) if unmethylated
tttatttatatattttttatttagtgaagtatgttttgttatttatatggaagttattagttttttttttagggagaggtttgtcggaaaatagattattgatatagaaatatataygtttattttagtttagattaattaatggagggttttgtttttatttatgagtgaatgttagagttygttaaataggaggaaaggttatagaagtatggaggaaaaggatcgggtaggtttggtggtttattttgggaggttgaggtaggtggagtttttgagtttaggagtttaagattagtt

SEQ ID NO: 521 - DNA, 300 bp, synthetic construct
  source 1..300: mol_type = other DNA
  modified_base 1: mod_base = OTHER; note = uracil
  modified_base 5: mod_base = OTHER; note = uracil
  modified_base 8: mod_base = OTHER; note = uracil
  modified_base 23: mod_base = OTHER; note = uracil
  modified_base 26: mod_base = OTHER; note = uracil
  modified_base 31: mod_base = OTHER; note = uracil
  modified_base 34..35: mod_base = OTHER; note = uracil
  modified_base 37..38: mod_base = OTHER; note = uracil
  modified_base 44: mod_base = OTHER; note = uracil
  modified_base 47: mod_base = OTHER; note = uracil
  modified_base 54..57: mod_base = OTHER; note = uracil
  modified_base 59..60: mod_base = OTHER; note = uracil
  modified_base 63..64: mod_base = OTHER; note = uracil
  modified_base 66..67: mod_base = OTHER; note = uracil
  modified_base 69..70: mod_base = OTHER; note = uracil
  modified_base 73: mod_base = OTHER; note = uracil
  modified_base 77: mod_base = OTHER; note = uracil
  modified_base 81: mod_base = OTHER; note = uracil
  modified_base 83: mod_base = OTHER; note = uracil
  modified_base 88..89: mod_base = OTHER; note = uracil
  modified_base 91: mod_base = OTHER; note = uracil
  modified_base 96..98: mod_base = OTHER; note = uracil
  modified_base 110..111: mod_base = OTHER; note = uracil
  modified_base 116: mod_base = OTHER; note = uracil
  modified_base 118: mod_base = OTHER; note = uracil
  modified_base 120..124: mod_base = OTHER; note = uracil
  modified_base 127: mod_base = OTHER; note = uracil
  modified_base 130..131: mod_base = OTHER; note = uracil
  modified_base 134: mod_base = OTHER; note = uracil
  modified_base 138..139: mod_base = OTHER; note = uracil
  modified_base 145..146: mod_base = OTHER; note = uracil
  modified_base 148: mod_base = OTHER; note = uracil
  modified_base 153: mod_base = OTHER; note = uracil
  modified_base 156: mod_base = OTHER; note = uracil
  modified_base 158: mod_base = OTHER; note = uracil
  modified_base 161: mod_base = OTHER; note = uracil
  modified_base 163: mod_base = OTHER; note = uracil
  modified_base 170..171: mod_base = OTHER; note = uracil
  modified_base 175..176: mod_base = OTHER; note = uracil
  modified_base 178: mod_base = OTHER; note = uracil
  modified_base 186..188: mod_base = OTHER; note = uracil
  modified_base 190..191: mod_base = OTHER; note = uracil
  modified_base 195..197: mod_base = OTHER; note = uracil
  modified_base 200: mod_base = OTHER; note = uracil
  modified_base 212..213: mod_base = OTHER; note = uracil
  modified_base 219..220: mod_base = OTHER; note = uracil
  modified_base 224: mod_base = OTHER; note = uracil
  modified_base 239..240: mod_base = OTHER; note = uracil
  modified_base 242..243: mod_base = OTHER; note = uracil
  modified_base 245..246: mod_base = OTHER; note = uracil
  modified_base 253: mod_base = OTHER; note = uracil
  modified_base 257: mod_base = OTHER; note = uracil
  modified_base 259..262: mod_base = OTHER; note = uracil
  modified_base 265..266: mod_base = OTHER; note = uracil
  modified_base 269: mod_base = OTHER; note = uracil
  modified_base 271..272: mod_base = OTHER; note = uracil
  modified_base 274: mod_base = OTHER; note = uracil
  modified_base 278: mod_base = OTHER; note = uracil
  modified_base 285: mod_base = OTHER; note = uracil
  modified_base 287..288: mod_base = OTHER; note = uracil
  modified_base 295..296: mod_base = OTHER; note = uracil
  modified_base 299: mod_base = OTHER; note = uracil
  modified_base 104: mod_base = m5c
  modified_base 108: mod_base = m5c
  modified_base 112: mod_base = m5c
  modified_base 164: mod_base = m5c
  modified_base 172: mod_base = m5c
  modified_base 179: mod_base = m5c
  modified_base 215: mod_base = m5c
  modified_base 225: mod_base = m5c
  modified_base 237: mod_base = m5c
  modified_base 289: mod_base = m5c
  variation 151: note = CpG site, residue is C if methylated or T(=U) if unmethylated
taagtattttagtgatgtgagttattaaaatttttttttgggtttgttttgagttttatttttttttttttgtagttatgtttttagttttagggttttggggcggacgttcggatatttttttagtagtttgttttttagaggttattgygttgtttagtttcgggggttcgtttttcgtggatttttttaggtttagtagagtgtttgattacgggtttgatcgggaggggagacgttattttttggggatttgtattttaattagtattattgttatgagatattcggaggttagta

SEQ ID NO: 522 - DNA, 300 bp, synthetic construct
  source 1..300: mol_type = other DNA
  modified_base 3: mod_base = OTHER; note = uracil
  modified_base 7..8: mod_base = OTHER; note = uracil
  modified_base 10: mod_base = OTHER; note = uracil
  modified_base 18: mod_base = OTHER; note = uracil
  modified_base 20: mod_base = OTHER; note = uracil
  modified_base 25: mod_base = OTHER; note = uracil
  modified_base 33: mod_base = OTHER; note = uracil
  modified_base 45: mod_base = OTHER; note = uracil
  modified_base 50..53: mod_base = OTHER; note = uracil
  modified_base 66: mod_base = OTHER; note = uracil
  modified_base 68..71: mod_base = OTHER; note = uracil
  modified_base 73..74: mod_base = OTHER; note = uracil
  modified_base 79: mod_base = OTHER; note = uracil
  modified_base 83..84: mod_base = OTHER; note = uracil
  modified_base 91: mod_base = OTHER; note = uracil
  modified_base 95: mod_base = OTHER; note = uracil
  modified_base 97: mod_base = OTHER; note = uracil
  modified_base 99: mod_base = OTHER; note = uracil
  modified_base 102: mod_base = OTHER; note = uracil
  modified_base 107..108: mod_base = OTHER; note = uracil
  modified_base 118..119: mod_base = OTHER; note = uracil
  modified_base 132..135: mod_base = OTHER; note = uracil
  modified_base 141: mod_base = OTHER; note = uracil
  modified_base 146: mod_base = OTHER; note = uracil
  modified_base 151: mod_base = OTHER; note = uracil
  modified_base 157..158: mod_base = OTHER; note = uracil
  modified_base 160: mod_base = OTHER; note = uracil
  modified_base 168: mod_base = OTHER; note = uracil
  modified_base 172: mod_base = OTHER; note = uracil
  modified_base 175: mod_base = OTHER; note = uracil
  modified_base 187: mod_base = OTHER; note = uracil
  modified_base 195: mod_base = OTHER; note = uracil
  modified_base 198..201: mod_base = OTHER; note = uracil
  modified_base 206..208: mod_base = OTHER; note = uracil
  modified_base 214: mod_base = OTHER; note = uracil
  modified_base 221: mod_base = OTHER; note = uracil
  modified_base 226: mod_base = OTHER; note = uracil
  modified_base 229: mod_base = OTHER; note = uracil
  modified_base 248: mod_base = OTHER; note = uracil
  modified_base 250: mod_base = OTHER; note = uracil
  modified_base 255: mod_base = OTHER; note = uracil
  modified_base 259..261: mod_base = OTHER; note = uracil
  modified_base 280: mod_base = OTHER; note = uracil
  modified_base 282: mod_base = OTHER; note = uracil
  modified_base 284: mod_base = OTHER; note = uracil
  modified_base 287: mod_base = OTHER; note = uracil
  modified_base 289: mod_base = OTHER; note = uracil
  modified_base 297: mod_base = OTHER; note = uracil
  modified_base 11: mod_base = m5c
  modified_base 63: mod_base = m5c
  modified_base 75: mod_base = m5c
  modified_base 85: mod_base = m5c
  modified_base 121: mod_base = m5c
  modified_base 128: mod_base = m5c
  modified_base 136: mod_base = m5c
  modified_base 188: mod_base = m5c
  modified_base 192: mod_base = m5c
  modified_base 196: mod_base = m5c
  variation 149: note = CpG site, residue is C if methylated or T(=U) if unmethylated
tgttggttttcgggtgttttatgatagtggtgttggttggggtgtaagtttttaggaggtggcgttttttttttcggttaggttcgtggttaaatattttgttgggtttggagggatttacggaggacgggttttcggagttgagtagygtagtggtttttggaaagtaggttgttgggggagtgttcgggcgttcgttttagggttttgaggttaagagtatgattgtaggaggaggaaggtggggtttaaagtagatttaggaggaagttttgatgatttatattattaagatgtttg

SEQ ID NO: 523 - DNA, 300 bp, synthetic construct
  source 1..300: mol_type = other DNA
  modified_base 7..8: mod_base = OTHER; note = uracil
  modified_base 12: mod_base = OTHER; note = uracil
  modified_base 14: mod_base = OTHER; note = uracil
  modified_base 17: mod_base = OTHER; note = uracil
  modified_base 22: mod_base = OTHER; note = uracil
  modified_base 29: mod_base = OTHER; note = uracil
  modified_base 38..41: mod_base = OTHER; note = uracil
  modified_base 45..46: mod_base = OTHER; note = uracil
  modified_base 75..77: mod_base = OTHER; note = uracil
  modified_base 84: mod_base = OTHER; note = uracil
  modified_base 86: mod_base = OTHER; note = uracil
  modified_base 88: mod_base = OTHER; note = uracil
  modified_base 90..91: mod_base = OTHER; note = uracil
  modified_base 96: mod_base = OTHER; note = uracil
  modified_base 98..99: mod_base = OTHER; note = uracil
  modified_base 101..102: mod_base = OTHER; note = uracil
  modified_base 104..105: mod_base = OTHER; note = uracil
  modified_base 108..109: mod_base = OTHER; note = uracil
  modified_base 116: mod_base = OTHER; note = uracil
  modified_base 119: mod_base = OTHER; note = uracil
  modified_base 121..123: mod_base = OTHER; note = uracil
  modified_base 125: mod_base = OTHER; note = uracil
  modified_base 127..128: mod_base = OTHER; note = uracil
  modified_base 133: mod_base = OTHER; note = uracil
  modified_base 135..137: mod_base = OTHER; note = uracil
  modified_base 139: mod_base = OTHER; note = uracil
  modified_base 143: mod_base = OTHER; note = uracil
  modified_base 145..148: mod_base = OTHER; note = uracil
  modified_base 156..159: mod_base = OTHER; note = uracil
  modified_base 166: mod_base = OTHER; note = uracil
  modified_base 169..170: mod_base = OTHER; note = uracil
  modified_base 173: mod_base = OTHER; note = uracil
  modified_base 177..179: mod_base = OTHER; note = uracil
  modified_base 185..188: mod_base = OTHER; note = uracil
  modified_base 191..192: mod_base = OTHER; note = uracil
  modified_base 199: mod_base = OTHER; note = uracil
  modified_base 202: mod_base = OTHER; note = uracil
  modified_base 204: mod_base = OTHER; note = uracil
  modified_base 212..213: mod_base = OTHER; note = uracil
  modified_base 218..219: mod_base = OTHER; note = uracil
  modified_base 223: mod_base = OTHER; note = uracil
  modified_base 228: mod_base = OTHER; note = uracil
  modified_base 231: mod_base = OTHER; note = uracil
  modified_base 240..241: mod_base = OTHER; note = uracil
  modified_base 252..253: mod_base = OTHER; note = uracil
  modified_base 262: mod_base = OTHER; note = uracil
  modified_base 269: mod_base = OTHER; note = uracil
  modified_base 273: mod_base = OTHER; note = uracil
  modified_base 275..276: mod_base = OTHER; note = uracil
  modified_base 280: mod_base = OTHER; note = uracil
  modified_base 289: mod_base = OTHER; note = uracil
  modified_base 30: mod_base = m5c
  modified_base 65: mod_base = m5c
  modified_base 164: mod_base = m5c
  modified_base 210: mod_base = m5c
  modified_base 214: mod_base = m5c
  modified_base 255: mod_base = m5c
  variation 150: note = CpG site, residue is C if methylated or T(=U) if unmethylated
tgatgattaggtattgttattttttaggtcgggatttttttaagttttggtatttttaaaaatacgttatagtttttttgaaattttttttttattatttttatttttttgtttttattttttattttttggtattttttgtttttttayggtgtttttatgacgttgtttgtatgtttattggttttagtttgggagttttttagagacgttcgggttagatatggttgtagatagagttaagagggtggtttcgggtggttggtggtagttttttggttgtgggggtagaagtggggg

SEQ ID NO: 524 - DNA, 300 bp, synthetic construct
  source 1..300: mol_type = other DNA
  modified_base 1..5: mod_base = OTHER; note = uracil
  modified_base 7: mod_base = OTHER; note = uracil
  modified_base 10: mod_base = OTHER; note = uracil
  modified_base 13..17: mod_base = OTHER; note = uracil
  modified_base 19: mod_base = OTHER; note = uracil
  modified_base 22..23: mod_base = OTHER; note = uracil
  modified_base 30: mod_base = OTHER; note = uracil
  modified_base 33..34: mod_base = OTHER; note = uracil
  modified_base 36..37: mod_base = OTHER; note = uracil
  modified_base 40..41: mod_base = OTHER; note = uracil
  modified_base 43..44: mod_base = OTHER; note = uracil
  modified_base 50..51: mod_base = OTHER; note = uracil
  modified_base 53..55: mod_base = OTHER; note = uracil
  modified_base 57: mod_base = OTHER; note = uracil
  modified_base 62: mod_base = OTHER; note = uracil
  modified_base 64: mod_base = OTHER; note = uracil
  modified_base 68: mod_base = OTHER; note = uracil
  modified_base 71: mod_base = OTHER; note = uracil
  modified_base 74..75: mod_base = OTHER; note = uracil
  modified_base 80: mod_base = OTHER; note = uracil
  modified_base 84..85: mod_base = OTHER; note = uracil
  modified_base 93: mod_base = OTHER; note = uracil
  modified_base 95: mod_base = OTHER; note = uracil
  modified_base 103: mod_base = OTHER; note = uracil
  modified_base 105..107: mod_base = OTHER; note = uracil
  modified_base 111: mod_base = OTHER; note = uracil
  modified_base 117..118: mod_base = OTHER; note = uracil
  modified_base 125: mod_base = OTHER; note = uracil
  modified_base 129: mod_base = OTHER; note = uracil
  modified_base 133: mod_base = OTHER; note = uracil
  modified_base 139: mod_base = OTHER; note = uracil
  modified_base 147: mod_base = OTHER; note = uracil
  modified_base 149: mod_base = OTHER; note = uracil
  modified_base 160: mod_base = OTHER; note = uracil
  modified_base 169..170: mod_base = OTHER; note = uracil
  modified_base 190: mod_base = OTHER; note = uracil
  modified_base 221: mod_base = OTHER; note = uracil
  modified_base 229: mod_base = OTHER; note = uracil
  modified_base 251..252: mod_base = OTHER; note = uracil
  modified_base 257: mod_base = OTHER; note = uracil
  modified_base 268..269: mod_base = OTHER; note = uracil
  modified_base 273..274: mod_base = OTHER; note = uracil
  modified_base 285: mod_base = OTHER; note = uracil
  modified_base 290..291: mod_base = OTHER; note = uracil
  modified_base 296: mod_base = OTHER; note = uracil
  modified_base 299: mod_base = OTHER; note = uracil
  modified_base 45: mod_base = m5c
  modified_base 86: mod_base = m5c
  modified_base 90: mod_base = m5c
  modified_base 136: mod_base = m5c
  modified_base 235: mod_base = m5c
  modified_base 270: mod_base = m5c
  variation 150: note = CpG site, residue is C if methylated or T(=U) if unmethylated
tttttatttttgtttttatagttaggagattgttattagttattcgaggttatttttttggttttatttgtagttatgtttggttcgggcgtttttgagaagtttttaggttggggttaatgggtatgtaggtagcgttatggggatatygtggggagatagagggtgttaaggagtgggagatgaaaataggaaggtggaggtgataaggagagagttttaagggaattataacgtatttttaaaaatattaaggtttggggaaatttcggtttaaagaatagtagtgtttggttatta

SEQ ID NO: 525 - DNA, 300 bp, synthetic construct
  source 1..300: mol_type = other DNA
  modified_base 2..3: mod_base = OTHER; note = uracil
  modified_base 7..9: mod_base = OTHER; note = uracil
  modified_base 16: mod_base = OTHER; note = uracil
  modified_base 18: mod_base = OTHER; note = uracil
  modified_base 22: mod_base = OTHER; note = uracil
  modified_base 30: mod_base = OTHER; note = uracil
  modified_base 32: mod_base = OTHER; note = uracil
  modified_base 34: mod_base = OTHER; note = uracil
  modified_base 43..44: mod_base = OTHER; note = uracil
  modified_base 52: mod_base = OTHER; note = uracil
  modified_base 57..59: mod_base = OTHER; note = uracil
  modified_base 61: mod_base = OTHER; note = uracil
  modified_base 65..66: mod_base = OTHER; note = uracil
  modified_base 76: mod_base = OTHER; note = uracil
  modified_base 80..81: mod_base = OTHER; note = uracil
  modified_base 83..84: mod_base = OTHER; note = uracil
  modified_base 87..88: mod_base = OTHER; note = uracil
  modified_base 91..93: mod_base = OTHER; note = uracil
  modified_base 97..98: mod_base = OTHER; note = uracil
  modified_base 100..101: mod_base = OTHER; note = uracil
  modified_base 103..106: mod_base = OTHER; note = uracil
  modified_base 116..119: mod_base = OTHER; note = uracil
  modified_base 122..125: mod_base = OTHER; note = uracil
  modified_base 128: mod_base = OTHER; note = uracil
  modified_base 133: mod_base = OTHER; note = uracil
  modified_base 135..138: mod_base = OTHER; note = uracil
  modified_base 140..144: mod_base = OTHER; note = uracil
  modified_base 148: mod_base = OTHER; note = uracil
  modified_base 160..161: mod_base = OTHER; note = uracil
  modified_base 164: mod_base = OTHER; note = uracil
  modified_base 169..170: mod_base = OTHER; note = uracil
  modified_base 177..179: mod_base = OTHER; note = uracil
  modified_base 183..184: mod_base = OTHER; note = uracil
  modified_base 186..187: mod_base = OTHER; note = uracil
  modified_base 189..190: mod_base = OTHER; note = uracil
  modified_base 198: mod_base = OTHER; note = uracil
  modified_base 202: mod_base = OTHER; note = uracil
  modified_base 206..207: mod_base = OTHER; note = uracil
  modified_base 210..211: mod_base = OTHER; note = uracil
  modified_base 216: mod_base = OTHER; note = uracil
  modified_base 219..222: mod_base = OTHER; note = uracil
  modified_base 235: mod_base = OTHER; note = uracil
  modified_base 241: mod_base = OTHER; note = uracil
  modified_base 245: mod_base = OTHER; note = uracil
  modified_base 247..250: mod_base = OTHER; note = uracil
  modified_base 252..254: mod_base = OTHER; note = uracil
  modified_base 258: mod_base = OTHER; note = uracil
  modified_base 266..268: mod_base = OTHER; note = uracil
  modified_base 274: mod_base = OTHER; note = uracil
  modified_base 278..279: mod_base = OTHER; note = uracil
  modified_base 284: mod_base = OTHER; note = uracil
  modified_base 290: mod_base = OTHER; note = uracil
  modified_base 292: mod_base = OTHER; note = uracil
  modified_base 295: mod_base = OTHER; note = uracil
  modified_base 298: mod_base = OTHER; note = uracil
  modified_base 10: mod_base = m5c
  modified_base 12: mod_base = m5c
  modified_base 14: mod_base = m5c
  modified_base 24: mod_base = m5c
  modified_base 35: mod_base = m5c
  modified_base 37: mod_base = m5c
  modified_base 39: mod_base = m5c
  modified_base 46: mod_base = m5c
  modified_base 63: mod_base = m5c
  modified_base 67: mod_base = m5c
  modified_base 69: mod_base = m5c
  modified_base 72: mod_base = m5c
  modified_base 74: mod_base = m5c
  modified_base 85: mod_base = m5c
  modified_base 89: mod_base = m5c
  modified_base 94: mod_base = m5c
  modified_base 109: mod_base = m5c
  modified_base 129: mod_base = m5c
  modified_base 145: mod_base = m5c
  modified_base 175: mod_base = m5c
  modified_base 192: mod_base = m5c
  modified_base 199: mod_base = m5c
  modified_base 217: mod_base = m5c
  modified_base 231: mod_base = m5c
  modified_base 243: mod_base = m5c
  modified_base 255: mod_base = m5c
  modified_base 269: mod_base = m5c
  modified_base 275: mod_base = m5c
  modified_base 280: mod_base = m5c
  modified_base 285: mod_base = m5c
  modified_base 293: mod_base = m5c
  modified_base 299: mod_base = m5c
  variation 150: note = CpG site, residue is C if methylated or T(=U) if unmethylated
gtttagtttcgcgcgtatatatacgtgtgtttttcgcgcggatttcgggaattttgtttttacgttcgcggcgcgtttgtttttcgttcgtttcggtttttattttttcgagatgttttttttttagtcggtttttttttttttcggttygggaagaagtttgttgggttagggcgttttgattattttttcggaggtcggtaaatttgtttgaatcgttttagaggaatcgggtaggggttcgtattttatttcggtaggagggtttcgagatcgattcgggtcggggtttcgtagtcg

SEQ ID NO: 526 - DNA, 300 bp, synthetic construct
  source 1..300: mol_type = other DNA
  modified_base 4: mod_base = OTHER; note = uracil
  modified_base 12..14: mod_base = OTHER; note = uracil
  modified_base 18..19: mod_base = OTHER; note = uracil
  modified_base 29: mod_base = OTHER; note = uracil
  modified_base 36..38: mod_base = OTHER; note = uracil
  modified_base 40..41: mod_base = OTHER; note = uracil
  modified_base 44: mod_base = OTHER; note = uracil
  modified_base 61..64: mod_base = OTHER; note = uracil
  modified_base 67..68: mod_base = OTHER; note = uracil
  modified_base 74..75: mod_base = OTHER; note = uracil
  modified_base 77: mod_base = OTHER; note = uracil
  modified_base 88: mod_base = OTHER; note = uracil
  modified_base 92: mod_base = OTHER; note = uracil
  modified_base 100: mod_base = OTHER; note = uracil
  modified_base 104..105: mod_base = OTHER; note = uracil
  modified_base 107: mod_base = OTHER; note = uracil
  modified_base 120: mod_base = OTHER; note = uracil
  modified_base 127..129: mod_base = OTHER; note = uracil
  modified_base 133..135: mod_base = OTHER; note = uracil
  modified_base 138: mod_base = OTHER; note = uracil
  modified_base 142: mod_base = OTHER; note = uracil
  modified_base 145: mod_base = OTHER; note = uracil
  modified_base 148..149: mod_base = OTHER; note = uracil
  modified_base 154: mod_base = OTHER; note = uracil
  modified_base 170: mod_base = OTHER; note = uracil
  modified_base 174: mod_base = OTHER; note = uracil
  modified_base 186: mod_base = OTHER; note = uracil
  modified_base 189: mod_base = OTHER; note = uracil
  modified_base 205: mod_base = OTHER; note = uracil
  modified_base 222: mod_base = OTHER; note = uracil
  modified_base 230: mod_base = OTHER; note = uracil
  modified_base 245: mod_base = OTHER; note = uracil
  modified_base 252..253: mod_base = OTHER; note = uracil
  modified_base 260: mod_base = OTHER; note = uracil
  modified_base 272: mod_base = OTHER; note = uracil
  modified_base 274: mod_base = OTHER; note = uracil
  modified_base 295: mod_base = OTHER; note = uracil
  modified_base 300: mod_base = OTHER; note = uracil
  modified_base 1: mod_base = m5c
  modified_base 7: mod_base = m5c
  modified_base 15: mod_base = m5c
  modified_base 20: mod_base = m5c
  modified_base 25: mod_base = m5c
  modified_base 31: mod_base = m5c
  modified_base 45: mod_base = m5c
  modified_base 57: mod_base = m5c
  modified_base 69: mod_base = m5c
  modified_base 83: mod_base = m5c
  modified_base 101: mod_base = m5c
  modified_base 108: mod_base = m5c
  modified_base 125: mod_base = m5c
  modified_base 155: mod_base = m5c
  modified_base 171: mod_base = m5c
  modified_base 191: mod_base = m5c
  modified_base 206: mod_base = m5c
  modified_base 211: mod_base = m5c
  modified_base 215: mod_base = m5c
  modified_base 226: mod_base = m5c
  modified_base 228: mod_base = m5c
  modified_base 231: mod_base = m5c
  modified_base 233: mod_base = m5c
  modified_base 237: mod_base = m5c
  modified_base 254: mod_base = m5c
  modified_base 261: mod_base = m5c
  modified_base 263: mod_base = m5c
  modified_base 265: mod_base = m5c
  modified_base 276: mod_base = m5c
  modified_base 286: mod_base = m5c
  modified_base 288: mod_base = m5c
  modified_base 290: mod_base = m5c
  variation 150: note = CpG site, residue is C if methylated or T(=U) if unmethylated
cggttgcggagtttcggttcgggtcggtttcggggtttttttgtcggggtggggtgcgagtttttgttcgatttttttggggcggtttaggtaggtttgtcggttttcgaggaggtggttagggcgttttggtttagtaggttttttttygagtcggggggaggggagatcggttggggaaggggtatttcgaaggggtggaggtcggggcgggcgggaggtaagcgcgtcgcgggcgtgagggtaaagttttcgaggttcgcgcggagagtatacgtgtatgtgcgcgcggggttaggt

SEQ ID NO: 527 - DNA, 300 bp, synthetic construct
  source 1..300: mol_type = other DNA
  modified_base 14: mod_base = OTHER; note = uracil
  modified_base 17..19: mod_base = OTHER; note = uracil
  modified_base 24: mod_base = OTHER; note = uracil
  modified_base 29: mod_base = OTHER; note = uracil
  modified_base 40: mod_base = OTHER; note = uracil
  modified_base 58: mod_base = OTHER; note = uracil
  modified_base 62: mod_base = OTHER; note = uracil
  modified_base 67: mod_base = OTHER; note = uracil
  modified_base 79: mod_base = OTHER; note = uracil
  modified_base 88: mod_base = OTHER; note = uracil
  modified_base 97: mod_base = OTHER; note = uracil
  modified_base 115: mod_base = OTHER; note = uracil
  modified_base 121: mod_base = OTHER; note = uracil
  modified_base 125: mod_base = OTHER; note = uracil
  modified_base 128..129: mod_base = OTHER; note = uracil
  modified_base 134..135: mod_base = OTHER; note = uracil
  modified_base 145: mod_base = OTHER; note = uracil
  modified_base 148: mod_base = OTHER; note = uracil
  modified_base 153: mod_base = OTHER; note = uracil
  modified_base 162..163: mod_base = OTHER; note = uracil
  modified_base 172: mod_base = OTHER; note = uracil
  modified_base 174..175: mod_base = OTHER; note = uracil
  modified_base 201..202: mod_base = OTHER; note = uracil
  modified_base 213..214: mod_base = OTHER; note = uracil
  modified_base 218..220: mod_base = OTHER; note = uracil
  modified_base 229: mod_base = OTHER; note = uracil
  modified_base 235: mod_base = OTHER; note = uracil
  modified_base 237: mod_base = OTHER; note = uracil
  modified_base 248..250: mod_base = OTHER; note = uracil
  modified_base 282: mod_base = OTHER; note = uracil
  modified_base 289: mod_base = OTHER; note = uracil
  modified_base 5: mod_base = m5c
  modified_base 8: mod_base = m5c
  modified_base 12: mod_base = m5c
  modified_base 21: mod_base = m5c
  modified_base 25: mod_base = m5c
  modified_base 31: mod_base = m5c
  modified_base 33: mod_base = m5c
  modified_base 41: mod_base = m5c
  modified_base 45: mod_base = m5c
  modified_base 52: mod_base = m5c
  modified_base 68: mod_base = m5c
  modified_base 83: mod_base = m5c
  modified_base 89: mod_base = m5c
  modified_base 112: mod_base = m5c
  modified_base 136: mod_base = m5c
  modified_base 203: mod_base = m5c
  modified_base 238: mod_base = m5c
  modified_base 255: mod_base = m5c
  variation 109: note = CpG site, residue is C if methylated or T(=U) if unmethylated
  variation 193: note = CpG site, residue is C if methylated or T(=U) if unmethylated
gaaacggcggtcgtagttttcggtcgggtacgcgtggggtcgttcgtggagcggtgttttgttaggtcggttggggtatttgcggggtcggatgggtttgagggtgagyggcggttggggtaggttgttaaagttcgggtggatttgtttgtttttgaatgttttgatggtttttagaggggtaatagggggygggttgattcggatggggtttatgttttggaagggtttgtgtttcggaatggagtttatgtcgttggggtggtggtagaggttgtagttaggaattatggggaagag

SEQ ID NO: 528 - DNA, 301 bp, synthetic construct
  source 1..301: mol_type = other DNA
  modified_base 1: mod_base = OTHER; note = uracil
  modified_base 3: mod_base = OTHER; note = uracil
  modified_base 6..9: mod_base = OTHER; note = uracil
  modified_base 16..17: mod_base = OTHER; note = uracil
  modified_base 21: mod_base = OTHER; note = uracil
  modified_base 24: mod_base = OTHER; note = uracil
  modified_base 27..28: mod_base = OTHER; note = uracil
  modified_base 30: mod_base = OTHER; note = uracil
  modified_base 33..34: mod_base = OTHER; note = uracil
  modified_base 36..37: mod_base = OTHER; note = uracil
  modified_base 39..42: mod_base = OTHER; note = uracil
  modified_base 48: mod_base = OTHER; note = uracil
  modified_base 54: mod_base = OTHER; note = uracil
  modified_base 56..57: mod_base = OTHER; note = uracil
  modified_base 61: mod_base = OTHER; note = uracil
  modified_base 67: mod_base = OTHER; note = uracil
  modified_base 69: mod_base = OTHER; note = uracil
  modified_base 73..75: mod_base = OTHER; note = uracil
  modified_base 78..79: mod_base = OTHER; note = uracil
  modified_base 84: mod_base = OTHER; note = uracil
  modified_base 90..93: mod_base = OTHER; note = uracil
  modified_base 96: mod_base = OTHER; note = uracil
  modified_base 102: mod_base = OTHER; note = uracil
  modified_base 105..106: mod_base = OTHER; note = uracil
  modified_base 109..113: mod_base = OTHER; note = uracil
  modified_base 119..122: mod_base = OTHER; note = uracil
  modified_base 124: mod_base = OTHER; note = uracil
  modified_base 131..132: mod_base = OTHER; note = uracil
  modified_base 135: mod_base = OTHER; note = uracil
  modified_base 140: mod_base = OTHER; note = uracil
  modified_base 144: mod_base = OTHER; note = uracil
  modified_base 150: mod_base = OTHER; note = uracil
  modified_base 154: mod_base = OTHER; note = uracil
  modified_base 159..160: mod_base = OTHER; note = uracil
  modified_base 162..163: mod_base = OTHER; note = uracil
  modified_base 168: mod_base = OTHER; note = uracil
  modified_base 174: mod_base = OTHER; note = uracil
  modified_base 177..178: mod_base = OTHER; note = uracil
  modified_base 181..184: mod_base = OTHER; note = uracil
  modified_base 187: mod_base = OTHER; note = uracil
  modified_base 190: mod_base = OTHER; note = uracil
  modified_base 194: mod_base = OTHER; note = uracil
  modified_base 196: mod_base = OTHER; note = uracil
  modified_base 198..200: mod_base = OTHER; note = uracil
  modified_base 202: mod_base = OTHER; note = uracil
  modified_base 206..208: mod_base = OTHER; note = uracil
  modified_base 211: mod_base = OTHER; note = uracil
  modified_base 215..217: mod_base = OTHER; note = uracil
  modified_base 220: mod_base = OTHER; note = uracil
  modified_base 226..229: mod_base = OTHER; note = uracil
  modified_base 232: mod_base = OTHER; note = uracil
  modified_base 236..237: mod_base = OTHER; note = uracil
  modified_base 241: mod_base = OTHER; note = uracil
  modified_base 246: mod_base = OTHER; note = uracil
  modified_base 248: mod_base = OTHER; note = uracil
  modified_base 251: mod_base = OTHER; note = uracil
  modified_base 253..254: mod_base = OTHER; note = uracil
  modified_base 263..266: mod_base = OTHER; note = uracil
  modified_base 274..275: mod_base = OTHER; note = uracil
  modified_base 279: mod_base = OTHER; note = uracil
  modified_base 286: mod_base = OTHER; note = uracil
  modified_base 292: mod_base = OTHER; note = uracil
  modified_base 295: mod_base = OTHER; note = uracil
  modified_base 301: mod_base = OTHER; note = uracil
  modified_base 45: mod_base = m5c
  modified_base 62: mod_base = m5c
  modified_base 97: mod_base = m5c
  modified_base 164: mod_base = m5c
  modified_base 188: mod_base = m5c
  modified_base 191: mod_base = m5c
  modified_base 212: mod_base = m5c
  modified_base 218: mod_base = m5c
  modified_base 233: mod_base = m5c
  modified_base 249: mod_base = m5c
  modified_base 256: mod_base = m5c
  modified_base 260: mod_base = m5c
  modified_base 268: mod_base = m5c
  modified_base 270: mod_base = m5c
  modified_base 276: mod_base = m5c
  modified_base 280: mod_base = m5c
  modified_base 289: mod_base = m5c
  modified_base 293: mod_base = m5c
  modified_base 296: mod_base = m5c
  variation 107: note = CpG site, residue is C if methylated or T(=U) if unmethylated
  variation 192: note = CpG site, residue is C if methylated or T(=U) if unmethylated
tttttttttatgatttttgattataatttttattattattttaacgatatgggttttatttcggagtataagtttttttagggtatggattttattcgggttaattygttttttattatttttttggagattattaaggtatttaaagataagtagatttattcgggttttggtagtttgttttagtcgtcygtttatttttaagtttattcggtttcgtaagtattttaatcggtttagtaagatatcgttttacgaacggttttacgcgtgttcggtcgagggttgcgatcgtcgtttt

SEQ ID NO: 529 - DNA, 300 bp, synthetic construct
  source 1..300: mol_type = other DNA
  modified_base 3..5: mod_base = OTHER; note = uracil
  modified_base 9: mod_base = OTHER; note = uracil
  modified_base 17: mod_base = OTHER; note = uracil
  modified_base 23: mod_base = OTHER; note = uracil
  modified_base 29: mod_base = OTHER; note = uracil
  modified_base 34: mod_base = OTHER; note = uracil
  modified_base 36: mod_base = OTHER; note = uracil
  modified_base 38: mod_base = OTHER; note = uracil
  modified_base 41: mod_base = OTHER; note = uracil
  modified_base 44..45: mod_base = OTHER; note = uracil
  modified_base 47: mod_base = OTHER; note = uracil
  modified_base 50..51: mod_base = OTHER; note = uracil
  modified_base 53..54: mod_base = OTHER; note = uracil
  modified_base 61: mod_base = OTHER; note = uracil
  modified_base 65: mod_base = OTHER; note = uracil
  modified_base 70: mod_base = OTHER; note = uracil
  modified_base 72..73: mod_base = OTHER; note = uracil
  modified_base 76..77: mod_base = OTHER; note = uracil
  modified_base 79: mod_base = OTHER; note = uracil
  modified_base 82..83: mod_base = OTHER; note = uracil
  modified_base 85: mod_base = OTHER; note = uracil
  modified_base 87: mod_base = OTHER; note = uracil
  modified_base 94: mod_base = OTHER; note = uracil
  modified_base 103: mod_base = OTHER; note = uracil
  modified_base 107: mod_base = OTHER; note = uracil
  modified_base 111: mod_base = OTHER; note = uracil
  modified_base 113..114: mod_base = OTHER; note = uracil
  modified_base 117: mod_base = OTHER; note = uracil
  modified_base 119: mod_base = OTHER; note = uracil
  modified_base 121..123: mod_base = OTHER; note = uracil
  modified_base 126: mod_base = OTHER; note = uracil
  modified_base 158: mod_base = OTHER; note = uracil
  modified_base 160..161: mod_base = OTHER; note = uracil
  modified_base 170: mod_base = OTHER; note = uracil
  modified_base 174: mod_base = OTHER; note = uracil
  modified_base 179: mod_base = OTHER; note = uracil
  modified_base 181: mod_base = OTHER; note = uracil
  modified_base 185: mod_base = OTHER; note = uracil
  modified_base 187..188: mod_base = OTHER; note = uracil
  modified_base 192..193: mod_base = OTHER; note = uracil
  modified_base 195: mod_base = OTHER; note = uracil
  modified_base 203..204: mod_base = OTHER; note = uracil
  modified_base 206..207: mod_base = OTHER; note = uracil
  modified_base 210..211: mod_base = OTHER; note = uracil
  modified_base 216..217: mod_base = OTHER; note = uracil
  modified_base 219..221: mod_base = OTHER; note = uracil
  modified_base 228: mod_base = OTHER; note = uracil
  modified_base 247..248: mod_base = OTHER; note = uracil
  modified_base 250: mod_base = OTHER; note = uracil
  modified_base 253: mod_base = OTHER; note = uracil
  modified_base 255..256: mod_base = OTHER; note = uracil
  modified_base 261: mod_base = OTHER; note = uracil
  modified_base 291: mod_base = OTHER; note = uracil
  modified_base 296..297: mod_base = OTHER; note = uracil
  modified_base 48: mod_base = m5c
  modified_base 55: mod_base = m5c
  modified_base 163: mod_base = m5c
  modified_base 208: mod_base = m5c
  modified_base 229: mod_base = m5c
  modified_base 251: mod_base = m5c
  variation 150: note = CpG site, residue is C if methylated or T(=U) if unmethylated
tgtttaggttggagtgtagtggtaaaattttggtttattttaattttcgtttttcgggtttaagtaatttttttgttttagttttttaagtagttgggattataggtatgtattattatatttagttgattttgtatttttagtagagayggggttttattacgttgtttaagttggttttaaatttttgattttaggtgatttattcgttttggttttttaaagtgtcgggattataggtgtgagttatcgtatttgggtaattagtattgtatttaagagtttatatttatatttata

SEQ ID NO: 530 - DNA, 300 bp, synthetic construct
  source 1..300: mol_type = other DNA
  modified_base 19: mod_base = OTHER; note = uracil
  modified_base 21: mod_base = OTHER; note = uracil
  modified_base 29: mod_base = OTHER; note = uracil
  modified_base 34: mod_base = OTHER; note = uracil
  modified_base 41..43: mod_base = OTHER; note = uracil
  modified_base 55: mod_base = OTHER; note = uracil
  modified_base 57: mod_base = OTHER; note = uracil
  modified_base 59: mod_base = OTHER; note = uracil
  modified_base 61..62: mod_base = OTHER; note = uracil
  modified_base 69..70: mod_base = OTHER; note = uracil
  modified_base 74: mod_base = OTHER; note = uracil
  modified_base 76: mod_base = OTHER; note = uracil
  modified_base 86..87: mod_base = OTHER; note = uracil
  modified_base 101: mod_base = OTHER; note = uracil
  modified_base 103..104: mod_base = OTHER; note = uracil
  modified_base 111: mod_base = OTHER; note = uracil
  modified_base 124..125: mod_base = OTHER; note = uracil
  modified_base 128: mod_base = OTHER; note = uracil
  modified_base 134: mod_base = OTHER; note = uracil
  modified_base 147..149: mod_base = OTHER; note = uracil
  modified_base 153: mod_base = OTHER; note = uracil
  modified_base 155: mod_base = OTHER; note = uracil
  modified_base 158: mod_base = OTHER; note = uracil
  modified_base 167: mod_base = OTHER; note = uracil
  modified_base 173: mod_base = OTHER; note = uracil
  modified_base 176: mod_base = OTHER; note = uracil
  modified_base 191: mod_base = OTHER; note = uracil
  modified_base 195..196: mod_base = OTHER; note = uracil
  modified_base 203..205: mod_base = OTHER; note = uracil
  modified_base 208: mod_base = OTHER; note = uracil
  modified_base 211: mod_base = OTHER; note = uracil
  modified_base 220: mod_base = OTHER; note = uracil
  modified_base 226: mod_base = OTHER; note = uracil
  modified_base 237: mod_base = OTHER; note = uracil
  modified_base 243..244: mod_base = OTHER; note = uracil
  modified_base 268..269: mod_base = OTHER; note = uracil
  modified_base 279..280: mod_base = OTHER; note = uracil
  modified_base 282: mod_base = OTHER; note = uracil
  modified_base 285: mod_base = OTHER; note = uracil
  modified_base 287: mod_base = OTHER; note = uracil
  modified_base 289..290: mod_base = OTHER; note = uracil
  modified_base 293..294: mod_base = OTHER; note = uracil
  modified_base 299: mod_base = OTHER; note = uracil
  modified_base 49: mod_base = m5c
  modified_base 71: mod_base = m5c
  modified_base 92: mod_base = m5c
  modified_base 137: mod_base = m5c
  modified_base 245: mod_base = m5c
  modified_base 252: mod_base = m5c
  variation 150: note = CpG site, residue is C if methylated or T(=U) if unmethylated
tatggatatgaatataaatttttaaatataatattaattgtttaggtgcggtggtttatatttataatttcggtattttgggaggttaaggcgggtggattatttgaggttaggagtttgagattagtttgaataacgtggtgaaatttygtttttattaaaaatataaaattagttgggtgtgatggtgtatgtttgtaattttagttatttgagaggttgaggtaggagaattgtttgaattcgggaggcggaggttgaagtgagttaagattttgttattgtattttagtttgggta

SEQ ID NO: 531 - DNA, 300 bp, synthetic construct
  source 1..300: mol_type = other DNA
  modified_base 6: mod_base = OTHER; note = uracil
  modified_base 9: mod_base = OTHER; note = uracil
  modified_base 18: mod_base = OTHER; note = uracil
  modified_base 20: mod_base = OTHER; note = uracil
  modified_base 28: mod_base = OTHER; note = uracil
  modified_base 35: mod_base = OTHER; note = uracil
  modified_base 46: mod_base = OTHER; note = uracil
  modified_base 49: mod_base = OTHER; note = uracil
  modified_base 63: mod_base = OTHER; note = uracil
  modified_base 80: mod_base = OTHER; note = uracil
  modified_base 84: mod_base = OTHER; note = uracil
  modified_base 90..92: mod_base = OTHER; note = uracil
  modified_base 107: mod_base = OTHER; note = uracil
  modified_base 109: mod_base = OTHER; note = uracil
  modified_base 113: mod_base = OTHER; note = uracil
  modified_base 122: mod_base = OTHER; note = uracil
  modified_base 125: mod_base = OTHER; note = uracil
  modified_base 129..130: mod_base = OTHER; note = uracil
  modified_base 138: mod_base = OTHER; note = uracil
  modified_base 149: mod_base = OTHER; note = uracil
  modified_base 154: mod_base = OTHER; note = uracil
  modified_base 159: mod_base = OTHER; note = uracil
  modified_base 169: mod_base = OTHER; note = uracil
  modified_base 177: mod_base = OTHER; note = uracil
  modified_base 183..184: mod_base = OTHER; note = uracil
  modified_base 188..189: mod_base = OTHER; note = uracil
  modified_base 208: mod_base = OTHER; note = uracil
  modified_base 213: mod_base = OTHER; note = uracil
  modified_base 216: mod_base = OTHER; note = uracil
  modified_base 219: mod_base = OTHER; note = uracil
  modified_base 222: mod_base = OTHER; note = uracil
  modified_base 224: mod_base = OTHER; note = uracil
  modified_base 226: mod_base = OTHER; note = uracil
  modified_base 232..233: mod_base = OTHER; note = uracil
  modified_base 242: mod_base = OTHER; note = uracil
  modified_base 245: mod_base = OTHER; note = uracil
  modified_base 247: mod_base = OTHER; note = uracil
  modified_base 250..251: mod_base = OTHER; note = uracil
  modified_base 253: mod_base = OTHER; note = uracil
  modified_base 258: mod_base = OTHER; note = uracil
  modified_base 261: mod_base = OTHER; note = uracil
  modified_base 269: mod_base = OTHER; note = uracil
  modified_base 275: mod_base = OTHER; note = uracil
  modified_base 278: mod_base = OTHER; note = uracil
  modified_base 284: mod_base = OTHER; note = uracil
  modified_base 288: mod_base = OTHER; note = uracil
  modified_base 293: mod_base = OTHER; note = uracil
  modified_base 296: mod_base = OTHER; note = uracil
  modified_base 300: mod_base = OTHER; note = uracil
  modified_base 39: mod_base = m5c
  modified_base 93: mod_base = m5c
  modified_base 131: mod_base = m5c
  modified_base 195: mod_base = m5c
  modified_base 255: mod_base = m5c
  modified_base 289: mod_base = m5c
  variation 143: note = CpG site, residue is C if methylated or T(=U) if unmethylated
  variation 160: note = CpG site, residue is C if methylated or T(=U) if unmethylated
tgttattttattgaatttttataatagtttaatgttatcggttttttttttaattttgggggtatagtggggagataagtaaattgatatttcggaggttgagtgatttatttatggaatgtagtaggttcgtgagttaaagygagtatatggtaagatygagtgaagttggggaataatagttaagttaagagcgttttaaagatatttagtatttttattatattgaattttaaggtgatagtatttttattcgatagtaaaatgttagatttaattgttttttttcggtttttaaat

SEQ ID NO: 532 - DNA, 300 bp, synthetic construct
  source 1..300: mol_type = other DNA
  modified_base 10: mod_base = OTHER; note = uracil
  modified_base 21: mod_base = OTHER; note = uracil
  modified_base 30: mod_base = OTHER; note = uracil
  modified_base 34: mod_base = OTHER; note = uracil
  modified_base 41: mod_base = OTHER; note = uracil
  modified_base 57: mod_base = OTHER; note = uracil
  modified_base 61: mod_base = OTHER; note = uracil
  modified_base 63..64: mod_base = OTHER; note = uracil
  modified_base 73: mod_base = OTHER; note = uracil
  modified_base 89: mod_base = OTHER; note = uracil
  modified_base 97: mod_base = OTHER; note = uracil
  modified_base 107: mod_base = OTHER; note = uracil
  modified_base 109: mod_base = OTHER; note = uracil
  modified_base 114: mod_base = OTHER; note = uracil
  modified_base 119: mod_base = OTHER; note = uracil
  modified_base 127..130: mod_base = OTHER; note = uracil
  modified_base 133: mod_base = OTHER; note = uracil
  modified_base 136: mod_base = OTHER; note = uracil
  modified_base 138: mod_base = OTHER; note = uracil
  modified_base 144: mod_base = OTHER; note = uracil
  modified_base 148..149: mod_base = OTHER; note = uracil
  modified_base 155: mod_base = OTHER; note = uracil
  modified_base 159: mod_base = OTHER; note = uracil
  modified_base 165: mod_base = OTHER; note = uracil
  modified_base 167: mod_base = OTHER; note = uracil
  modified_base 173..174: mod_base = OTHER; note = uracil
  modified_base 177: mod_base = OTHER; note = uracil
  modified_base 180: mod_base = OTHER; note = uracil
  modified_base 184..185: mod_base = OTHER; note = uracil
  modified_base 196: mod_base = OTHER; note = uracil
  modified_base 198: mod_base = OTHER; note = uracil
  modified_base 200: mod_base = OTHER; note = uracil
  modified_base 203..204: mod_base = OTHER; note = uracil
  modified_base 206: mod_base = OTHER; note = uracil
  modified_base 215: mod_base = OTHER; note = uracil
  modified_base 222: mod_base = OTHER; note = uracil
  modified_base 227: mod_base = OTHER; note = uracil
  modified_base 229..232: mod_base = OTHER; note = uracil
  modified_base 234: mod_base = OTHER; note = uracil
  modified_base 239..243: mod_base = OTHER; note = uracil
  modified_base 260: mod_base = OTHER; note = uracil
  modified_base 267: mod_base = OTHER; note = uracil
  modified_base 274: mod_base = OTHER; note = uracil
  modified_base 288: mod_base = OTHER; note = uracil
  modified_base 299: mod_base = OTHER; note = uracil
  modified_base 11: mod_base = m5c
  modified_base 45: mod_base = m5c
  modified_base 105: mod_base = m5c
  modified_base 169: mod_base = m5c
  modified_base 207: mod_base = m5c
  modified_base 261: mod_base = m5c
  variation 140: note = CpG site, residue is C if methylated or T(=U) if unmethylated
  variation 157: note = CpG site, residue is C if methylated or T(=U) if unmethylated
gtttgaagatcggaaagaaatagttgaatttgatattttgttgtcgagtggaagtgttgttattttaggatttagtgtgatgaagatgttaagtatttttaaaacgtttttggtttggttattgttttttagttttattyggttttgttatgtattygttttgatttacgggtttgttgtattttatgaatgagttatttaattttcggggtattagtttgtttatttttttattatgtttttaaaattaagaagaaaatcgatagtattaagttattatgagaatttaatgaagtaata

SEQ ID NO: 533 - DNA, 300 bp, synthetic construct
  source 1..300: mol_type = other DNA
  modified_base 10..11: mod_base = OTHER; note = uracil
  modified_base 23: mod_base = OTHER; note = uracil
  modified_base 29..30: mod_base = OTHER; note = uracil
  modified_base 35: mod_base = OTHER; note = uracil
  modified_base 38..41: mod_base = OTHER; note = uracil
  modified_base 54: mod_base = OTHER; note = uracil
  modified_base 56: mod_base = OTHER; note = uracil
  modified_base 68: mod_base = OTHER; note = uracil
  modified_base 70..71: mod_base = OTHER; note = uracil
  modified_base 75..76: mod_base = OTHER; note = uracil
  modified_base 80: mod_base = OTHER; note = uracil
  modified_base 84: mod_base = OTHER; note = uracil
  modified_base 86: mod_base = OTHER; note = uracil
  modified_base 95: mod_base = OTHER; note = uracil
  modified_base 97: mod_base = OTHER; note = uracil
  modified_base 99..101: mod_base = OTHER; note = uracil
  modified_base 105..107: mod_base = OTHER; note = uracil
  modified_base 114: mod_base = OTHER; note = uracil
  modified_base 121: mod_base = OTHER; note = uracil
  modified_base 131: mod_base = OTHER; note = uracil
  modified_base 135..136: mod_base = OTHER; note = uracil
  modified_base 139..140: mod_base = OTHER; note = uracil
  modified_base 142: mod_base = OTHER; note = uracil
  modified_base 145: mod_base = OTHER; note = uracil
  modified_base 147: mod_base = OTHER; note = uracil
  modified_base 154..155: mod_base = OTHER; note = uracil
  modified_base 163: mod_base = OTHER; note = uracil
  modified_base 165..166: mod_base = OTHER; note = uracil
  modified_base 168: mod_base = OTHER; note = uracil
  modified_base 172: mod_base = OTHER; note = uracil
  modified_base 177: mod_base = OTHER; note = uracil
  modified_base 183..184: mod_base = OTHER; note = uracil
  modified_base 189: mod_base = OTHER; note = uracil
  modified_base 193: mod_base = OTHER; note = uracil
  modified_base 197: mod_base = OTHER; note = uracil
  modified_base 205: mod_base = OTHER; note = uracil
  modified_base 210: mod_base = OTHER; note = uracil
  modified_base 214: mod_base = OTHER; note = uracil
  modified_base 216: mod_base = OTHER; note = uracil
  modified_base 226: mod_base = OTHER; note = uracil
  modified_base 235: mod_base = OTHER; note = uracil
  modified_base 241..243: mod_base = OTHER; note = uracil
  modified_base 248..250: mod_base = OTHER; note = uracil
  modified_base 255: mod_base = OTHER; note = uracil
  modified_base 288: mod_base = OTHER; note = uracil
  modified_base 292..294: mod_base = OTHER; note = uracil
  modified_base 298: mod_base = OTHER; note = uracil
  modified_base 18: mod_base = m5c
  modified_base 92: mod_base = m5c
  modified_base 108: mod_base = m5c
  modified_base 198: mod_base = m5c
  modified_base 220: mod_base = m5c
  variation 150: note = CpG site, residue is C if methylated or T(=U) if unmethylated
ttagtattattaaatatcgagttaagggtttgattagttttaaaagaatgaggtatttttaatgtgatattatttttggtagttttaggttcggtttttttaggtttcggatgtagatggttgttaggggttggttatttttattttaayggttttggaaggtattatttttagggtatatgttatgattaatatttcggtgagtaatgttgatttaatcgtagattgttattttatgtttttagtattttgtgtaggaagggaagggaaatgagtaatagatgtattagttttatttaa

SEQ ID NO: 534 - DNA, 300 bp, synthetic construct
  source 1..300: mol_type = other DNA
  modified_base 11: mod_base = OTHER; note = uracil
  modified_base 17: mod_base = OTHER; note = uracil
  modified_base 20: mod_base = OTHER; note = uracil
  modified_base 26: mod_base = OTHER; note = uracil
  modified_base 28: mod_base = OTHER; note = uracil
  modified_base 33..35: mod_base = OTHER; note = uracil
  modified_base 38..40: mod_base = OTHER; note = uracil
  modified_base 43..44: mod_base = OTHER; note = uracil
  modified_base 47: mod_base = OTHER; note = uracil
  modified_base 49: mod_base = OTHER; note = uracil
  modified_base 56: mod_base = OTHER; note = uracil
  modified_base 63: mod_base = OTHER; note = uracil
  modified_base 73: mod_base = OTHER; note = uracil
  modified_base 77: mod_base = OTHER; note = uracil
  modified_base 89: mod_base = OTHER; note = uracil
  modified_base 92: mod_base = OTHER; note = uracil
  modified_base 97: mod_base = OTHER; note = uracil
  modified_base 99: mod_base = OTHER; note = uracil
  modified_base 101: mod_base = OTHER; note = uracil
  modified_base 114: mod_base = OTHER; note = uracil
  modified_base 119: mod_base = OTHER; note = uracil
  modified_base 125..127: mod_base = OTHER; note = uracil
  modified_base 139..140: mod_base = OTHER; note = uracil
  modified_base 143..144: mod_base = OTHER; note = uracil
  modified_base 149: mod_base = OTHER; note = uracil
  modified_base 167..168: mod_base = OTHER; note = uracil
  modified_base 171..174: mod_base = OTHER; note = uracil
  modified_base 178: mod_base = OTHER; note = uracil
  modified_base 181..182: mod_base = OTHER; note = uracil
  modified_base 185: mod_base = OTHER; note = uracil
  modified_base 188: mod_base = OTHER; note = uracil
  modified_base 191: mod_base = OTHER; note = uracil
  modified_base 197..198: mod_base = OTHER; note = uracil
  modified_base 207: mod_base = OTHER; note = uracil
  modified_base 212..213: mod_base = OTHER; note = uracil
  modified_base 219: mod_base = OTHER; note = uracil
  modified_base 222..223: mod_base = OTHER; note = uracil
  modified_base 235: mod_base = OTHER; note = uracil
  modified_base 237: mod_base = OTHER; note = uracil
  modified_base 248..249: mod_base = OTHER; note = uracil
  modified_base 251: mod_base = OTHER; note = uracil
  modified_base 255: mod_base = OTHER; note = uracil
  modified_base 264: mod_base = OTHER; note = uracil
  modified_base 269: mod_base = OTHER; note = uracil
  modified_base 273..275: mod_base = OTHER; note = uracil
  modified_base 280: mod_base = OTHER; note = uracil
  modified_base 297: mod_base = OTHER; note = uracil
  modified_base 80: mod_base = m5c
  modified_base 102: mod_base = m5c
  modified_base 192: mod_base = m5c
  modified_base 208: mod_base = m5c
  modified_base 282: mod_base = m5c
  variation 150: note = CpG site, residue is C if methylated or T(=U) if unmethylated
ttgaatgggattgatatatttattatttattttttttttttttttgtatagggtattgggaatatgaaataatagtttacgattgagttagtattgtttatcggaatgttagttatggtatatgttttgaaagtggtgttttttaggatygttgagatgaggatggttagtttttaatagttatttgtattcggggtttgggagagtcgaatttgagattgttaggaatggtgttatattaaaagtgttttatttttttggggttgattaggtttttgattcgatatttggtaatattaa

SEQ ID NO: 535 - DNA, 300 bp, synthetic construct
  source 1..300: mol_type = other DNA
  modified_base 9: mod_base = OTHER; note = uracil
  modified_base 12: mod_base = OTHER; note = uracil
  modified_base 18: mod_base = OTHER; note = uracil
  modified_base 26: mod_base = OTHER; note = uracil
  modified_base 37..38: mod_base = OTHER; note = uracil
  modified_base 48: mod_base = OTHER; note = uracil
  modified_base 60: mod_base = OTHER; note = uracil
  modified_base 69: mod_base = OTHER; note = uracil
  modified_base 74..75: mod_base = OTHER; note = uracil
  modified_base 83: mod_base = OTHER; note = uracil
  modified_base 85: mod_base = OTHER; note = uracil
  modified_base 99: mod_base = OTHER; note = uracil
  modified_base 104: mod_base = OTHER; note = uracil
  modified_base 109: mod_base = OTHER; note = uracil
  modified_base 114: mod_base = OTHER; note = uracil
  modified_base 118: mod_base = OTHER; note = uracil
  modified_base 125..126: mod_base = OTHER; note = uracil
  modified_base 129: mod_base = OTHER; note = uracil
  modified_base 131: mod_base = OTHER; note = uracil
  modified_base 134..135: mod_base = OTHER; note = uracil
  modified_base 139: mod_base = OTHER; note = uracil
  modified_base 141..142: mod_base = OTHER; note = uracil
  modified_base 149: mod_base = OTHER; note = uracil
  modified_base 153: mod_base = OTHER; note = uracil
  modified_base 158: mod_base = OTHER; note = uracil
  modified_base 163: mod_base = OTHER; note = uracil
  modified_base 187: mod_base = OTHER; note = uracil
  modified_base 193: mod_base = OTHER; note = uracil
  modified_base 201: mod_base = OTHER; note = uracil
  modified_base 212..214: mod_base = OTHER; note = uracil
  modified_base 220..223: mod_base = OTHER; note = uracil
  modified_base 225..226: mod_base = OTHER; note = uracil
  modified_base 228..229: mod_base = OTHER; note = uracil
  modified_base 232..236: mod_base = OTHER; note = uracil
  modified_base 242: mod_base = OTHER; note = uracil
  modified_base 268..270: mod_base = OTHER; note = uracil
  modified_base 298: mod_base = OTHER; note = uracil
  modified_base 20: mod_base = m5c
  modified_base 67: mod_base = m5c
  modified_base 119: mod_base = m5c
  modified_base 127: mod_base = m5c
  modified_base 215: mod_base = m5c
  modified_base 237: mod_base = m5c
  modified_base 257: mod_base = m5c
  variation 151: note = CpG site, residue is C if methylated or T(=U) if unmethylated
agtggtggttgttgtttttcggtggtagagatgatgtttggtttatttttagtaaagtgtttaggacgttgagtttgaggggttttggaatggaaaaataaaataaaataaaataaatcggaggttcgttttgtttggtttttagagataygtaaagttgggtaaaggaaggagattgaggtgggattgagatattgttgtattgtgaatgtttcggttttttattttttgtttttcgaattatgattgttttatgcggttatttttttttttggtgaggaaaatgggatgtggtgttaa

SEQ ID NO: 536 - DNA, 300 bp, synthetic construct
  source 1..300: mol_type = other DNA
  modified_base 5: mod_base = OTHER; note = uracil
  modified_base 7..8: mod_base = OTHER; note = uracil
  modified_base 10: mod_base = OTHER; note = uracil
  modified_base 13..15: mod_base = OTHER; note = uracil
  modified_base 21..22: mod_base = OTHER; note = uracil
  modified_base 24: mod_base = OTHER; note = uracil
  modified_base 26..27: mod_base = OTHER; note = uracil
  modified_base 42: mod_base = OTHER; note = uracil
  modified_base 45: mod_base = OTHER; note = uracil
  modified_base 52: mod_base = OTHER; note = uracil
  modified_base 56: mod_base = OTHER; note = uracil
  modified_base 70: mod_base = OTHER; note = uracil
  modified_base 84: mod_base = OTHER; note = uracil
  modified_base 90: mod_base = OTHER; note = uracil
  modified_base 94: mod_base = OTHER; note = uracil
  modified_base 96: mod_base = OTHER; note = uracil
  modified_base 101: mod_base = OTHER; note = uracil
  modified_base 104: mod_base = OTHER; note = uracil
  modified_base 110: mod_base = OTHER; note = uracil
  modified_base 112: mod_base = OTHER; note = uracil
  modified_base 116..118: mod_base = OTHER; note = uracil
  modified_base 120..121: mod_base = OTHER; note = uracil
  modified_base 123: mod_base = OTHER; note = uracil
  modified_base 127: mod_base = OTHER; note = uracil
  modified_base 129..130: mod_base = OTHER; note = uracil
  modified_base 133..134: mod_base = OTHER; note = uracil
  modified_base 139..141: mod_base = OTHER; note = uracil
  modified_base 144: mod_base = OTHER; note = uracil
  modified_base 154: mod_base = OTHER; note = uracil
  modified_base 156: mod_base = OTHER; note = uracil
  modified_base 163..164: mod_base = OTHER; note = uracil
  modified_base 168: mod_base = OTHER; note = uracil
  modified_base 177..178: mod_base = OTHER; note = uracil
  modified_base 180: mod_base = OTHER; note = uracil
  modified_base 208..209: mod_base = OTHER; note = uracil
  modified_base 213..214: mod_base = OTHER; note = uracil
  modified_base 219..222: mod_base = OTHER; note = uracil
  modified_base 224: mod_base = OTHER; note = uracil
  modified_base 228: mod_base = OTHER; note = uracil
  modified_base 230: mod_base = OTHER; note = uracil
  modified_base 236..237: mod_base = OTHER; note = uracil
  modified_base 242: mod_base = OTHER; note = uracil
  modified_base 244: mod_base = OTHER; note = uracil
  modified_base 249: mod_base = OTHER; note = uracil
  modified_base 260..261: mod_base = OTHER; note = uracil
  modified_base 265: mod_base = OTHER; note = uracil
  modified_base 268: mod_base = OTHER; note = uracil
  modified_base 271: mod_base = OTHER; note = uracil
  modified_base 273: mod_base = OTHER; note = uracil
  modified_base 276..277: mod_base = OTHER; note = uracil
  modified_base 279: mod_base = OTHER; note = uracil
  modified_base 287: mod_base = OTHER; note = uracil
  modified_base 290: mod_base = OTHER; note = uracil
  modified_base 293..294: mod_base = OTHER; note = uracil
  modified_base 296..297: mod_base = OTHER; note = uracil
  modified_base 299: mod_base = OTHER; note = uracil
  modified_base 43: mod_base = m5c
  modified_base 63: mod_base = m5c
  modified_base 85: mod_base = m5c
  modified_base 173: mod_base = m5c
  modified_base 181: mod_base = m5c
  modified_base 233: mod_base = m5c
  modified_base 280: mod_base = m5c
  variation 149: note = CpG site, residue is C if methylated or T(=U) if unmethylated
ttgatattatattttattttttttattaaagggaaaaataatcgtataaaataattatgattcggggggtaggaggtggggaatcggggtatttataatgtaataatgttttagttttattttaattttttttttttgtttagttttgygtgtttttaggagttaggtagagcgggttttcggtttgttttgttttgttttgtttttttattttagagttttttaggtttagcgttttaagtattttattaagaataaattaggtattatttttgttatcgagaaatagtagttattatt

SEQ ID NO: 537 - DNA, 300 bp, synthetic construct
  source 1..300: mol_type = other DNA
  modified_base 9: mod_base = OTHER; note = uracil
  modified_base 15: mod_base = OTHER; note = uracil
  modified_base 21: mod_base = OTHER; note = uracil
  modified_base 23: mod_base = OTHER; note = uracil
  modified_base 32..33: mod_base = OTHER; note = uracil
  modified_base 36: mod_base = OTHER; note = uracil
  modified_base 42: mod_base = OTHER; note = uracil
  modified_base 45: mod_base = OTHER; note = uracil
  modified_base 50: mod_base = OTHER; note = uracil
  modified_base 52: mod_base = OTHER; note = uracil
  modified_base 54: mod_base = OTHER; note = uracil
  modified_base 57: mod_base = OTHER; note = uracil
  modified_base 61: mod_base = OTHER; note = uracil
  modified_base 65: mod_base = OTHER; note = uracil
  modified_base 70..72: mod_base = OTHER; note = uracil
  modified_base 75: mod_base = OTHER; note = uracil
  modified_base 83: mod_base = OTHER; note = uracil
  modified_base 88: mod_base = OTHER; note = uracil
  modified_base 90: mod_base = OTHER; note = uracil
  modified_base 93: mod_base = OTHER; note = uracil
  modified_base 96..98: mod_base = OTHER; note = uracil
  modified_base 100: mod_base = OTHER; note = uracil
  modified_base 102: mod_base = OTHER; note = uracil
  modified_base 110..111: mod_base = OTHER; note = uracil
  modified_base 113: mod_base = OTHER; note = uracil
  modified_base 115..117: mod_base = OTHER; note = uracil
  modified_base 122: mod_base = OTHER; note = uracil
  modified_base 124: mod_base = OTHER; note = uracil
  modified_base 126: mod_base = OTHER; note = uracil
  modified_base 131: mod_base = OTHER; note = uracil
  modified_base 134: mod_base = OTHER; note = uracil
  modified_base 138..139: mod_base = OTHER; note = uracil
  modified_base 141..142: mod_base = OTHER; note = uracil
  modified_base 145: mod_base = OTHER; note = uracil
  modified_base 148..149: mod_base = OTHER; note = uracil
  modified_base 154: mod_base = OTHER; note = uracil
  modified_base 157: mod_base = OTHER; note = uracil
  modified_base 161: mod_base = OTHER; note = uracil
  modified_base 172: mod_base = OTHER; note = uracil
  modified_base 211: mod_base = OTHER; note = uracil
  modified_base 222: mod_base = OTHER; note = uracil
  modified_base 227: mod_base = OTHER; note = uracil
  modified_base 231..234: mod_base = OTHER; note = uracil
  modified_base 237..240: mod_base = OTHER; note = uracil
  modified_base 251: mod_base = OTHER; note = uracil
  modified_base 253: mod_base = OTHER; note = uracil
  modified_base 258..260: mod_base = OTHER; note = uracil
  modified_base 264: mod_base = OTHER; note = uracil
  modified_base 276: mod_base = OTHER; note = uracil
  modified_base 278: mod_base = OTHER; note = uracil
  modified_base 285: mod_base = OTHER; note = uracil
  modified_base 288: mod_base = OTHER; note = uracil
  modified_base 290..291: mod_base = OTHER; note = uracil
  modified_base 293..296: mod_base = OTHER; note = uracil
  modified_base 6: mod_base = m5c
  modified_base 29: mod_base = m5c
  modified_base 68: mod_base = m5c
  modified_base 73: mod_base = m5c
  modified_base 86: mod_base = m5c
  modified_base 94: mod_base = m5c
  modified_base 118: mod_base = m5c
  modified_base 132: mod_base = m5c
  modified_base 135: mod_base = m5c
  modified_base 155: mod_base = m5c
  modified_base 162: mod_base = m5c
  modified_base 179: mod_base = m5c
  modified_base 181: mod_base = m5c
  modified_base 197: mod_base = m5c
  modified_base 202: mod_base = m5c
  modified_base 205: mod_base = m5c
  modified_base 243: mod_base = m5c
  modified_base 246: mod_base = m5c
  modified_base 271: mod_base = m5c
  modified_base 279: mod_base = m5c
  modified_base 286: mod_base = m5c
  variation 150: note = CpG site, residue is C if methylated or T(=U) if unmethylated
ggggtcggtatgggttggagtttagagacggttagttaggattttaggatatatagtaaattagttgcgtttcgttgagggttagcgtatagtcgtttatataaggtgtttttttttcgggttttttgggtcgtcggttttttgtttttygtgtcgtagatcgggattagattgtggacgcggggaaggaagggggcgttgcgacgggattttgaggggagtaggatttgtttttgtttttgcggcgaagttttaggttttggtaaggttcggtatatcgggggtcgtttttttttaggg

SEQ ID NO: 538 - DNA, 300 bp, synthetic construct
  source 1..300: mol_type = other DNA
  modified_base 1..3: mod_base = OTHER; note = uracil
  modified_base 17..20: mod_base = OTHER; note = uracil
  modified_base 28: mod_base = OTHER; note = uracil
  modified_base 33..34: mod_base = OTHER; note = uracil
  modified_base 38..39: mod_base = OTHER; note = uracil
  modified_base 44..45: mod_base = OTHER; note = uracil
  modified_base 51: mod_base = OTHER; note = uracil
  modified_base 56: mod_base = OTHER; note = uracil
  modified_base 59: mod_base = OTHER; note = uracil
  modified_base 65: mod_base = OTHER; note = uracil
  modified_base 71: mod_base = OTHER; note = uracil
  modified_base 76..77: mod_base = OTHER; note = uracil
  modified_base 80: mod_base = OTHER; note = uracil
  modified_base 82..85: mod_base = OTHER; note = uracil
  modified_base 87: mod_base = OTHER; note = uracil
  modified_base 93..94: mod_base = OTHER; note = uracil
  modified_base 100: mod_base = OTHER; note = uracil
  modified_base 105..109: mod_base = OTHER; note = uracil
  modified_base 112..113: mod_base = OTHER; note = uracil
  modified_base 116..118: mod_base = OTHER; note = uracil
  modified_base 124..125: mod_base = OTHER; note = uracil
  modified_base 127: mod_base = OTHER; note = uracil
  modified_base 131: mod_base = OTHER; note = uracil
  modified_base 136..137: mod_base = OTHER; note = uracil
  modified_base 142: mod_base = OTHER; note = uracil
  modified_base 148: mod_base = OTHER; note = uracil
  modified_base 157: mod_base = OTHER; note = uracil
  modified_base 164: mod_base = OTHER; note = uracil
  modified_base 171..173: mod_base = OTHER; note = uracil
  modified_base 180..181: mod_base = OTHER; note = uracil
  modified_base 193: mod_base = OTHER; note = uracil
  modified_base 195..196: mod_base = OTHER; note = uracil
  modified_base 209: mod_base = OTHER; note = uracil
  modified_base 216: mod_base = OTHER; note = uracil
  modified_base 220..222: mod_base = OTHER; note = uracil
  modified_base 224: mod_base = OTHER; note = uracil
  modified_base 234: mod_base = OTHER; note = uracil
  modified_base 237: mod_base = OTHER; note = uracil
  modified_base 245: mod_base = OTHER; note = uracil
  modified_base 253..254: mod_base = OTHER; note = uracil
  modified_base 261..262: mod_base = OTHER; note = uracil
  modified_base 266: mod_base = OTHER; note = uracil
  modified_base 270: mod_base = OTHER; note = uracil
  modified_base 274: mod_base = OTHER; note = uracil
  modified_base 276: mod_base = OTHER; note = uracil
  modified_base 281: mod_base = OTHER; note = uracil
  modified_base 283..284: mod_base = OTHER; note = uracil
  modified_base 287..289: mod_base = OTHER; note = uracil
  modified_base 293: mod_base = OTHER; note = uracil
  modified_base 297..300: mod_base = OTHER; note = uracil
  modified_base 14: mod_base = m5c
  modified_base 21: mod_base = m5c
  modified_base 29: mod_base = m5c
  modified_base 54: mod_base = m5c
  modified_base 57: mod_base = m5c
  modified_base 95: mod_base = m5c
  modified_base 98: mod_base = m5c
  modified_base 103: mod_base = m5c
  modified_base 119: mod_base = m5c
  modified_base 121: mod_base = m5c
  modified_base 138: mod_base = m5c
  modified_base 145: mod_base = m5c
  modified_base 165: mod_base = m5c
  modified_base 168: mod_base = m5c
  modified_base 182: mod_base = m5c
  modified_base 206: mod_base = m5c
  modified_base 214: mod_base = m5c
  modified_base 227: mod_base = m5c
  modified_base 232: mod_base = m5c
  modified_base 271: mod_base = m5c
  modified_base 294: mod_base = m5c
  variation 150: note = CpG site, residue is C if methylated or T(=U) if unmethylated
ttttggggaggagcggttttcggtgtatcgaattttgttagggtttagagtttcgtcgtaggggtaggggtaagttttgttttttttaagatttcgtcgtaacgttttttttttttttcgcgtttatagtttaatttcggtttgcggtaygggaagtaggaggtcggcggtttagagagttcggggagaggatattttgtgtgggcggttgtgcgttgatttttagcggggcgtagttagtttgttgtgtgttttgaagttttagttggtcgtttttgagttttagtttatgtcgatttt

SEQ ID NO: 539 - DNA, 300 bp, synthetic construct
  source 1..300: mol_type = other DNA
  modified_base 4: mod_base = OTHER; note = uracil
  modified_base 8: mod_base = OTHER; note = uracil
  modified_base 18..19: mod_base = OTHER; note = uracil
  modified_base 21: mod_base = OTHER; note = uracil
  modified_base 23: mod_base = OTHER; note = uracil
  modified_base 39: mod_base = OTHER; note = uracil
  modified_base 50: mod_base = OTHER; note = uracil
  modified_base 57..58: mod_base = OTHER; note = uracil
  modified_base 60: mod_base = OTHER; note = uracil
  modified_base 64..65: mod_base = OTHER; note = uracil
  modified_base 70: mod_base = OTHER; note = uracil
  modified_base 78: mod_base = OTHER; note = uracil
  modified_base 80: mod_base = OTHER; note = uracil
  modified_base 89: mod_base = OTHER; note = uracil
  modified_base 96: mod_base = OTHER; note = uracil
  modified_base 100..101: mod_base = OTHER; note = uracil
  modified_base 103: mod_base = OTHER; note = uracil
  modified_base 107: mod_base = OTHER; note = uracil
  modified_base 128: mod_base = OTHER; note = uracil
  modified_base 132: mod_base = OTHER; note = uracil
  modified_base 137..138: mod_base = OTHER; note = uracil
  modified_base 154..155: mod_base = OTHER; note = uracil
  modified_base 158..159: mod_base = OTHER; note = uracil
  modified_base 162: mod_base = OTHER; note = uracil
  modified_base 164: mod_base = OTHER; note = uracil
  modified_base 166..167: mod_base = OTHER; note = uracil
  modified_base 169: mod_base = OTHER; note = uracil
  modified_base 171: mod_base = OTHER; note = uracil
  modified_base 173: mod_base = OTHER; note = uracil
  modified_base 176: mod_base = OTHER; note = uracil
  modified_base 181: mod_base = OTHER; note = uracil
  modified_base 186..187: mod_base = OTHER; note = uracil
  modified_base 189: mod_base = OTHER; note = uracil
  modified_base 196: mod_base = OTHER; note = uracil
  modified_base 201..202: mod_base = OTHER; note = uracil
  modified_base 205: mod_base = OTHER; note = uracil
  modified_base 210: mod_base = OTHER; note = uracil
  modified_base 214..215: mod_base = OTHER; note = uracil
  modified_base 227: mod_base = OTHER; note = uracil
  modified_base 230: mod_base = OTHER; note = uracil
  modified_base 233: mod_base = OTHER; note = uracil
  modified_base 248: mod_base = OTHER; note = uracil
  modified_base 265: mod_base = OTHER; note = uracil
  modified_base 270..272: mod_base = OTHER; note = uracil
  modified_base 279..280: mod_base = OTHER; note = uracil
  modified_base 284..285: mod_base = OTHER; note = uracil
  modified_base 293: mod_base = OTHER; note = uracil
  modified_base 300: mod_base = OTHER; note = uracil
  modified_base 6: mod_base = m5c
  modified_base 40: mod_base = m5c
  modified_base 108: mod_base = m5c
  modified_base 156: mod_base = m5c
  modified_base 179: mod_base = m5c
  modified_base 219: mod_base = m5c
  modified_base 273: mod_base = m5c
  modified_base 281: mod_base = m5c
  modified_base 298: mod_base = m5c
  variation 150: note = CpG site, residue is C if methylated or T(=U) if unmethylated
gtgtacgtagggaaatattttatagggtaaatttggattcgattgagaataggaagttataggttaatataaggaggttttgtgagaatagatgataaattataagtcggggagggggaggaaagagttttttgggtttgggggatgggygagttcgttagtatattatatatagttgcgtttggttttagtaattaaaattattattatagatttgacggtttggttgtagttgtaaagagataagtatgttggaagagaaaatagggtttcggtgattcggttttagggtttgagcgt

SEQ ID NO: 540 - DNA, 300 bp, synthetic construct
  source 1..300: mol_type = other DNA
  modified_base 3: mod_base = OTHER; note = uracil
  modified_base 5: mod_base = OTHER; note = uracil
  modified_base 9..11: mod_base = OTHER; note = uracil
  modified_base 17: mod_base = OTHER; note = uracil
  modified_base 23: mod_base = OTHER; note = uracil
  modified_base 25: mod_base = OTHER; note = uracil
  modified_base 31..33: mod_base = OTHER; note = uracil
  modified_base 40: mod_base = OTHER; note = uracil
  modified_base 42: mod_base = OTHER; note = uracil
  modified_base 45..46: mod_base = OTHER; note = uracil
  modified_base 49: mod_base = OTHER; note = uracil
  modified_base 53: mod_base = OTHER; note = uracil
  modified_base 58: mod_base = OTHER; note = uracil
  modified_base 60: mod_base = OTHER; note = uracil
  modified_base 65: mod_base = OTHER; note = uracil
  modified_base 68: mod_base = OTHER; note = uracil
  modified_base 71: mod_base = OTHER; note = uracil
  modified_base 74..75: mod_base = OTHER; note = uracil
  modified_base 79: mod_base = OTHER; note = uracil
  modified_base 83: mod_base = OTHER; note = uracil
  modified_base 88: mod_base = OTHER; note = uracil
  modified_base 109: mod_base = OTHER; note = uracil
  modified_base 115..116: mod_base = OTHER; note = uracil
  modified_base 122: mod_base = OTHER; note = uracil
  modified_base 125: mod_base = OTHER; note = uracil
  modified_base 139: mod_base = OTHER; note = uracil
  modified_base 147: mod_base = OTHER; note = uracil
  modified_base 151..153: mod_base = OTHER; note = uracil
  modified_base 156..160: mod_base = OTHER; note = uracil
  modified_base 164..166: mod_base = OTHER; note = uracil
  modified_base 173: mod_base = OTHER; note = uracil
  modified_base 175: mod_base = OTHER; note = uracil
  modified_base 179..180: mod_base = OTHER; note = uracil
  modified_base 182..186: mod_base = OTHER; note = uracil
  modified_base 188..190: mod_base = OTHER; note = uracil
  modified_base 194: mod_base = OTHER; note = uracil
  modified_base 206: mod_base = OTHER; note = uracil
  modified_base 209: mod_base = OTHER; note = uracil
  modified_base 214: mod_base = OTHER; note = uracil
  modified_base 216: mod_base = OTHER; note = uracil
  modified_base 218: mod_base = OTHER; note = uracil
  modified_base 223..224: mod_base = OTHER; note = uracil
  modified_base 226..227: mod_base = OTHER; note = uracil
  modified_base 237..238: mod_base = OTHER; note = uracil
  modified_base 244: mod_base = OTHER; note = uracil
  modified_base 247..248: mod_base = OTHER; note = uracil
  modified_base 253: mod_base = OTHER; note = uracil
  modified_base 255: mod_base = OTHER; note = uracil
  modified_base 264..265: mod_base = OTHER; note = uracil
  modified_base 273..275: mod_base = OTHER; note = uracil
  modified_base 288..290: mod_base = OTHER; note = uracil
  modified_base 297: mod_base = OTHER; note = uracil
  modified_base 299: mod_base = OTHER; note = uracil
  modified_base 1: mod_base = m5c
  modified_base 18: mod_base = m5c
  modified_base 26: mod_base = m5c
  modified_base 80: mod_base = m5c
  modified_base 120: mod_base = m5c
  modified_base 143: mod_base = m5c
  modified_base 191: mod_base = m5c
  modified_base 259: mod_base = m5c
  modified_base 293: mod_base = m5c
  variation 149: note = CpG site, residue is C if methylated or T(=U) if unmethylated
cgtttagattttaaggtcgggttatcggggttttgtttttttttttaatatgtttatttttttatagttgtagttaaatcgttaggtttgtaatgatggttttgattattgaggttaagcgtagttgtgtgtggtgtgttggcgggttygtttattttttaggtttagaaagttttttttttttttttttcggtttgtggtttgttatttgtttttatagagtttttttgtattggtttgtggttttttgtttttaatcggatttaaatttattttgtgaggtatttttttgcgtgtata

SEQ ID NO: 541 - DNA, 300 bp, synthetic construct
  source 1..300: mol_type = other DNA
  modified_base 9: mod_base = OTHER; note = uracil
  modified_base 25: mod_base = OTHER; note = uracil
  modified_base 37: mod_base = OTHER; note = uracil
  modified_base 40: mod_base = OTHER; note = uracil
  modified_base 52: mod_base = OTHER; note = uracil
  modified_base 54: mod_base = OTHER; note = uracil
  modified_base 56: mod_base = OTHER; note = uracil
  modified_base 58: mod_base = OTHER; note = uracil
  modified_base 60: mod_base = OTHER; note = uracil
  modified_base 62: mod_base = OTHER; note = uracil
  modified_base 72: mod_base = OTHER; note = uracil
  modified_base 74: mod_base = OTHER; note = uracil
  modified_base 77..78: mod_base = OTHER; note = uracil
  modified_base 87: mod_base = OTHER; note = uracil
  modified_base 106: mod_base = OTHER; note = uracil
  modified_base 109: mod_base = OTHER; note = uracil
  modified_base 112: mod_base = OTHER; note = uracil
  modified_base 115: mod_base = OTHER; note = uracil
  modified_base 121: mod_base = OTHER; note = uracil
  modified_base 123: mod_base = OTHER; note = uracil
  modified_base 127: mod_base = OTHER; note = uracil
  modified_base 129: mod_base = OTHER; note = uracil
  modified_base 131..132: mod_base = OTHER; note = uracil
  modified_base 134: mod_base = OTHER; note = uracil
  modified_base 138..139: mod_base = OTHER; note = uracil
  modified_base 143..144: mod_base = OTHER; note = uracil
  modified_base 148: mod_base = OTHER; note = uracil
  modified_base 171..172: mod_base = OTHER; note = uracil
  modified_base 176: mod_base = OTHER; note = uracil
  modified_base 181..182: mod_base = OTHER; note = uracil
  modified_base 186: mod_base = OTHER; note = uracil
  modified_base 188..192: mod_base = OTHER; note = uracil
  modified_base 196: mod_base = OTHER; note = uracil
  modified_base 198: mod_base = OTHER; note = uracil
  modified_base 239: mod_base = OTHER; note = uracil
  modified_base 254..255: mod_base = OTHER; note = uracil
  modified_base 266: mod_base = OTHER; note = uracil
  modified_base 268: mod_base = OTHER; note = uracil
  modified_base 275: mod_base = OTHER; note = uracil
  modified_base 293..294: mod_base = OTHER; note = uracil
  modified_base 297: mod_base = OTHER; note = uracil
  modified_base 5: mod_base = m5c
  modified_base 21: mod_base = m5c
  modified_base 41: mod_base = m5c
  modified_base 65: mod_base = m5c
  modified_base 116: mod_base = m5c
  variation 149: note = CpG site, residue is C if methylated or T(=U) if unmethylated
tgtgcgggtagtgggttgtgcgggtagtgggttgtgtattcggatgtgtagtatttatatatttcgggtgattttttttgggtaagttgtggatgtgagtgggggtagtatttgtcgtgatttatttttttttttttttattttaagtygggtgggggagtttgggatttttagataaggtttggttttttttggtatagagggtgggagtggggatggggagggaggagggaagggttatgggaaggtggggttatgttttgtgtttaatgaattgagaagggggagggttttagttgg

SEQ ID NO: 542 - DNA, 300 bp, synthetic construct
  source 1..300: mol_type = other DNA
  modified_base 1: mod_base = OTHER; note = uracil
  modified_base 4: mod_base = OTHER; note = uracil
  modified_base 10..12: mod_base = OTHER; note = uracil
  modified_base 14..18: mod_base = OTHER; note = uracil
  modified_base 21: mod_base = OTHER; note = uracil
  modified_base 23: mod_base = OTHER; note = uracil
  modified_base 28: mod_base = OTHER; note = uracil
  modified_base 35: mod_base = OTHER; note = uracil
  modified_base 37: mod_base = OTHER; note = uracil
  modified_base 42: mod_base = OTHER; note = uracil
  modified_base 47..50: mod_base = OTHER; note = uracil
  modified_base 52..53: mod_base = OTHER; note = uracil
  modified_base 56..58: mod_base = OTHER; note = uracil
  modified_base 63..65: mod_base = OTHER; note = uracil
  modified_base 68..70: mod_base = OTHER; note = uracil
  modified_base 72..73: mod_base = OTHER; note = uracil
  modified_base 75..77: mod_base = OTHER; note = uracil
  modified_base 79..82: mod_base = OTHER; note = uracil
  modified_base 85..88: mod_base = OTHER; note = uracil
  modified_base 90: mod_base = OTHER; note = uracil
  modified_base 92..94: mod_base = OTHER; note = uracil
  modified_base 96..98: mod_base = OTHER; note = uracil
  modified_base 100: mod_base = OTHER; note = uracil
  modified_base 105..106: mod_base = OTHER; note = uracil
  modified_base 115..116: mod_base = OTHER; note = uracil
  modified_base 120..121: mod_base = OTHER; note = uracil
  modified_base 126: mod_base = OTHER; note = uracil
  modified_base 134..136: mod_base = OTHER; note = uracil
  modified_base 140: mod_base = OTHER; note = uracil
  modified_base 142..146: mod_base = OTHER; note = uracil
  modified_base 148..149: mod_base = OTHER; note = uracil
  modified_base 153: mod_base = OTHER; note = uracil
  modified_base 181: mod_base = OTHER; note = uracil
  modified_base 186: mod_base = OTHER; note = uracil
  modified_base 192: mod_base = OTHER; note = uracil
  modified_base 195..199: mod_base = OTHER; note = uracil
  modified_base 201: mod_base = OTHER; note = uracil
  modified_base 203: mod_base = OTHER; note = uracil
  modified_base 205: mod_base = OTHER; note = uracil
  modified_base 208..209: mod_base = OTHER; note = uracil
  modified_base 211: mod_base = OTHER; note = uracil
  modified_base 214: mod_base = OTHER; note = uracil
  modified_base 218..220: mod_base = OTHER; note = uracil
  modified_base 230: mod_base = OTHER; note = uracil
  modified_base 232..233: mod_base = OTHER; note = uracil
  modified_base 249: mod_base = OTHER; note = uracil
  modified_base 252: mod_base = OTHER; note = uracil
  modified_base 254: mod_base = OTHER; note = uracil
  modified_base 257: mod_base = OTHER; note = uracil
  modified_base 264: mod_base = OTHER; note = uracil
  modified_base 266: mod_base = OTHER; note = uracil
  modified_base 269..271: mod_base = OTHER; note = uracil
  modified_base 273: mod_base = OTHER; note = uracil
  modified_base 276..277: mod_base = OTHER; note = uracil
  modified_base 280: mod_base = OTHER; note = uracil
  modified_base 282: mod_base = OTHER; note = uracil
  modified_base 285..287: mod_base = OTHER; note = uracil
  modified_base 289: mod_base = OTHER; note = uracil
  modified_base 292..293: mod_base = OTHER; note = uracil
  modified_base 296: mod_base = OTHER; note = uracil
  modified_base 298: mod_base = OTHER; note = uracil
  modified_base 183: mod_base = m5c
  modified_base 234: mod_base = m5c
  modified_base 258: mod_base = m5c
  modified_base 278: mod_base = m5c
  modified_base 294: mod_base = m5c
  variation 150: note = CpG site, residue is C if methylated or T(=U) if unmethylated
tagttggaattttttttttttttagtttattgagtataaaatatggttttatttttttatgattttttttttttttttttttatttttatttttattttttgtgttagggggagttaggttttgtttggaaattttaaatttttttattyggtttggaatggaaagaggagagaatgagttacggtagatgttgtttttatttatatttatagtttatttaggaagagttattcgaagtgtgtgagtgttatatattcggatgtataatttattgttcgtataatttattgttcgtataa

SEQ ID NO: 543 - DNA, 300 bp, synthetic construct
  source 1..300: mol_type = other DNA
  modified_base 2: mod_base = OTHER; note = uracil
  modified_base 5: mod_base = OTHER; note = uracil
  modified_base 11: mod_base = OTHER; note = uracil
  modified_base 20: mod_base = OTHER; note = uracil
  modified_base 25: mod_base = OTHER; note = uracil
  modified_base 35: mod_base = OTHER; note = uracil
  modified_base 38: mod_base = OTHER; note = uracil
  modified_base 60..61: mod_base = OTHER; note = uracil
  modified_base 70: mod_base = OTHER; note = uracil
  modified_base 76..77: mod_base = OTHER; note = uracil
  modified_base 86: mod_base = OTHER; note = uracil
  modified_base 113: mod_base = OTHER; note = uracil
  modified_base 122: mod_base = OTHER; note = uracil
  modified_base 147..148: mod_base = OTHER; note = uracil
  modified_base 150: mod_base = OTHER; note = uracil
  modified_base 156: mod_base = OTHER; note = uracil
  modified_base 162: mod_base = OTHER; note = uracil
  modified_base 167: mod_base = OTHER; note = uracil
  modified_base 177..179: mod_base = OTHER; note = uracil
  modified_base 189..191: mod_base = OTHER; note = uracil
  modified_base 198..200: mod_base = OTHER; note = uracil
  modified_base 205..207: mod_base = OTHER; note = uracil
  modified_base 214..215: mod_base = OTHER; note = uracil
  modified_base 217: mod_base = OTHER; note = uracil
  modified_base 220..221: mod_base = OTHER; note = uracil
  modified_base 224: mod_base = OTHER; note = uracil
  modified_base 228: mod_base = OTHER; note = uracil
  modified_base 238: mod_base = OTHER; note = uracil
  modified_base 240: mod_base = OTHER; note = uracil
  modified_base 252..253: mod_base = OTHER; note = uracil
  modified_base 266..268: mod_base = OTHER; note = uracil
  modified_base 270..271: mod_base = OTHER; note = uracil
  modified_base 273..275: mod_base = OTHER; note = uracil
  modified_base 278..280: mod_base = OTHER; note = uracil
  modified_base 283: mod_base = OTHER; note = uracil
  modified_base 297: mod_base = OTHER; note = uracil
  modified_base 300: mod_base = OTHER; note = uracil
  modified_base 9: mod_base = m5c
  modified_base 26: mod_base = m5c
  modified_base 44: mod_base = m5c
  modified_base 80: mod_base = m5c
  modified_base 87: mod_base = m5c
  modified_base 98: mod_base = m5c
  modified_base 101: mod_base = m5c
  modified_base 108: mod_base = m5c
  modified_base 129: mod_base = m5c
  modified_base 133: mod_base = m5c
  modified_base 138: mod_base = m5c
  modified_base 140: mod_base = m5c
  modified_base 157: mod_base = m5c
  modified_base 169: mod_base = m5c
  modified_base 180: mod_base = m5c
  modified_base 211: mod_base = m5c
  modified_base 218: mod_base = m5c
  modified_base 260: mod_base = m5c
  modified_base 276: mod_base = m5c
  modified_base 294: mod_base = m5c
  variation 151: note = CpG site, residue is C if methylated or T(=U) if unmethylated
gtaattggcgttgggtaggtaaagtcgggagaaattgttgagacgaggttaggatttaatttttaaattttggagttatcggaaatcgaggggaggacgacgggtgtcggtgttaatgaggttgggggcgggcgatgcgcggtgggttttygagttcggggtaggtttcgggggtttttcggggaaggttttgggagtttttggttttggcggttttcgttattagattgggaatgtttttgattgggtggttaggaggcggtggttttttttttcgtttagttgaggggtgtcgttttt

SEQ ID NO: 544 - DNA, 300 bp, synthetic construct
  source 1..300: mol_type = other DNA
  modified_base 9: mod_base = OTHER; note = uracil
  modified_base 11..14: mod_base = OTHER; note = uracil
  modified_base 16: mod_base = OTHER; note = uracil
  modified_base 19: mod_base = OTHER; note = uracil
  modified_base 36..37: mod_base = OTHER; note = uracil
  modified_base 39: mod_base = OTHER; note = uracil
  modified_base 42..43: mod_base = OTHER; note = uracil
  modified_base 45..46: mod_base = OTHER; note = uracil
  modified_base 50..51: mod_base = OTHER; note = uracil
  modified_base 53..55: mod_base = OTHER; note = uracil
  modified_base 59: mod_base = OTHER; note = uracil
  modified_base 65: mod_base = OTHER; note = uracil
  modified_base 69..71: mod_base = OTHER; note = uracil
  modified_base 75: mod_base = OTHER; note = uracil
  modified_base 88: mod_base = OTHER; note = uracil
  modified_base 91..92: mod_base = OTHER; note = uracil
  modified_base 97..98: mod_base = OTHER; note = uracil
  modified_base 104: mod_base = OTHER; note = uracil
  modified_base 106..108: mod_base = OTHER; note = uracil
  modified_base 113..114: mod_base = OTHER; note = uracil
  modified_base 117..119: mod_base = OTHER; note = uracil
  modified_base 127..130: mod_base = OTHER; note = uracil
  modified_base 136..137: mod_base = OTHER; note = uracil
  modified_base 140..142: mod_base = OTHER; note = uracil
  modified_base 147: mod_base = OTHER; note = uracil
  modified_base 155..157: mod_base = OTHER; note = uracil
  modified_base 159: mod_base = OTHER; note = uracil
  modified_base 164: mod_base = OTHER; note = uracil
  modified_base 169..170: mod_base = OTHER; note = uracil
  modified_base 173..177: mod_base = OTHER; note = uracil
  modified_base 180..181: mod_base = OTHER; note = uracil
  modified_base 183: mod_base = OTHER; note = uracil
  modified_base 189: mod_base = OTHER; note = uracil
  modified_base 191: mod_base = OTHER; note = uracil
  modified_base 195: mod_base = OTHER; note = uracil
  modified_base 197..198: mod_base = OTHER; note = uracil
  modified_base 205..206: mod_base = OTHER; note = uracil
  modified_base 208..211: mod_base = OTHER; note = uracil
  modified_base 219: mod_base = OTHER; note = uracil
  modified_base 226: mod_base = OTHER; note = uracil
  modified_base 228..229: mod_base = OTHER; note = uracil
  modified_base 248..249: mod_base = OTHER; note = uracil
  modified_base 253..254: mod_base = OTHER; note = uracil
  modified_base 259: mod_base = OTHER; note = uracil
  modified_base 261: mod_base = OTHER; note = uracil
  modified_base 264: mod_base = OTHER; note = uracil
  modified_base 270: mod_base = OTHER; note = uracil
  modified_base 272..273: mod_base = OTHER; note = uracil
  modified_base 277: mod_base = OTHER; note = uracil
  modified_base 282..283: mod_base = OTHER; note = uracil
  modified_base 286..288: mod_base = OTHER; note = uracil
  modified_base 293..294: mod_base = OTHER; note = uracil
  modified_base 300: mod_base = OTHER; note = uracil
  modified_base 6: mod_base = m5c
  modified_base 24: mod_base = m5c
  modified_base 40: mod_base = m5c
  modified_base 82: mod_base = m5c
  modified_base 89: mod_base = m5c
  modified_base 120: mod_base = m5c
  modified_base 131: mod_base = m5c
  modified_base 143: mod_base = m5c
  modified_base 160: mod_base = m5c
  modified_base 162: mod_base = m5c
  modified_base 167: mod_base = m5c
  modified_base 171: mod_base = m5c
  modified_base 192: mod_base = m5c
  modified_base 199: mod_base = m5c
  modified_base 202: mod_base = m5c
  modified_base 213: mod_base = m5c
  modified_base 220: mod_base = m5c
  modified_base 256: mod_base = m5c
  modified_base 274: mod_base = m5c
  modified_base 291: mod_base = m5c
  variation 149: note = CpG site, residue is C if methylated or T(=U) if unmethylated
gaagacgatattttttagttgggcggggaggagggttatcgttttttggttatttaattagagatatttttagtttgatggcggaggtcgttagggttaagggtttttagggtttttttcggggaattttcgagatttgtttcggattyggaggtttatcgcgtatcgttcgtttttagttttattagtatcgatattcgtcgtttttttttcggttttcgatggttttagaatttaaaggttaaattttaatttcgttttagtagtttttttcggttttgtttatttagcgttagttgt

SEQ ID NO: 545 - DNA, 300 bp, synthetic construct
  source 1..300: mol_type = other DNA
  modified_base 4: mod_base = OTHER; note = uracil
  modified_base 6..8: mod_base = OTHER; note = uracil
  modified_base 10: mod_base = OTHER; note = uracil
  modified_base 16: mod_base = OTHER; note = uracil
  modified_base 19..20: mod_base = OTHER; note = uracil
  modified_base 24..25: mod_base = OTHER; note = uracil
  modified_base 36: mod_base = OTHER; note = uracil
  modified_base 38: mod_base = OTHER; note = uracil
  modified_base 41: mod_base = OTHER; note = uracil
  modified_base 46..47: mod_base = OTHER; note = uracil
  modified_base 49: mod_base = OTHER; note = uracil
  modified_base 53..54: mod_base = OTHER; note = uracil
  modified_base 56..57: mod_base = OTHER; note = uracil
  modified_base 64..66: mod_base = OTHER; note = uracil
  modified_base 68..69: mod_base = OTHER; note = uracil
  modified_base 76: mod_base = OTHER; note = uracil
  modified_base 78: mod_base = OTHER; note = uracil
  modified_base 83..85: mod_base = OTHER; note = uracil
  modified_base 99: mod_base = OTHER; note = uracil
  modified_base 104: mod_base = OTHER; note = uracil
  modified_base 108..110: mod_base = OTHER; note = uracil
  modified_base 112: mod_base = OTHER; note = uracil
  modified_base 124..125: mod_base = OTHER; note = uracil
  modified_base 130: mod_base = OTHER; note = uracil
  modified_base 134: mod_base = OTHER; note = uracil
  modified_base 139..142: mod_base = OTHER; note = uracil
  modified_base 146..147: mod_base = OTHER; note = uracil
  modified_base 153: mod_base = OTHER; note = uracil
  modified_base 171: mod_base = OTHER; note = uracil
  modified_base 174: mod_base = OTHER; note = uracil
  modified_base 177..178: mod_base = OTHER; note = uracil
  modified_base 182..183: mod_base = OTHER; note = uracil
  modified_base 187: mod_base = OTHER; note = uracil
  modified_base 189: mod_base = OTHER; note = uracil
  modified_base 193: mod_base = OTHER; note = uracil
  modified_base 196..197: mod_base = OTHER; note = uracil
  modified_base 199: mod_base = OTHER; note = uracil
  modified_base 202..203: mod_base = OTHER; note = uracil
  modified_base 208..209: mod_base = OTHER; note = uracil
  modified_base 213..215: mod_base = OTHER; note = uracil
  modified_base 218..220: mod_base = OTHER; note = uracil
  modified_base 231: mod_base = OTHER; note = uracil
  modified_base 236: mod_base = OTHER; note = uracil
  modified_base 242: mod_base = OTHER; note = uracil
  modified_base 249: mod_base = OTHER; note = uracil
  modified_base 272: mod_base = OTHER; note = uracil
  modified_base 274: mod_base = OTHER; note = uracil
  modified_base 278: mod_base = OTHER; note = uracil
  modified_base 285: mod_base = OTHER; note = uracil
  modified_base 287..288: mod_base = OTHER; note = uracil
  modified_base 296..297: mod_base = OTHER; note = uracil
  modified_base 89: mod_base = m5c
  modified_base 113: mod_base = m5c
  modified_base 180: mod_base = m5c
  modified_base 211: mod_base = m5c
  modified_base 298: mod_base = m5c
  variation 150: note = CpG site, residue is C if methylated or T(=U) if unmethylated
gggtattttttggtgtttttaggtttgtgaattggtatagtaggattatagatttttaaggtgtttatttgggggtttagaattttggcggggaaggttagtgttattttatcggagaagagatttagtttagttgagtttttggttagyggtaaggaggaaaggatgaatattagttacgtttggtattgattgttatagttagagtttcgtttagtttaagaatgtttttgttttaagattttttttttttttgtattttagaaattattataggtaaatgttattttgaagattcgg

SEQ ID NO: 546 - DNA, 300 bp, synthetic construct
  source 1..300: mol_type = other DNA
  modified_base 1: mod_base = OTHER; note = uracil
  modified_base 7: mod_base = OTHER; note = uracil
  modified_base 10: mod_base = OTHER; note = uracil
  modified_base 18: mod_base = OTHER; note = uracil
  modified_base 24..25: mod_base = OTHER; note = uracil
  modified_base 37: mod_base = OTHER; note = uracil
  modified_base 45: mod_base = OTHER; note = uracil
  modified_base 61: mod_base = OTHER; note = uracil
  modified_base 68: mod_base = OTHER; note = uracil
  modified_base 74: mod_base = OTHER; note = uracil
  modified_base 78: mod_base = OTHER; note = uracil
  modified_base 84: mod_base = OTHER; note = uracil
  modified_base 94: mod_base = OTHER; note = uracil
  modified_base 96: mod_base = OTHER; note = uracil
  modified_base 100: mod_base = OTHER; note = uracil
  modified_base 106: mod_base = OTHER; note = uracil
  modified_base 110: mod_base = OTHER; note = uracil
  modified_base 115..116: mod_base = OTHER; note = uracil
  modified_base 125: mod_base = OTHER; note = uracil
  modified_base 133: mod_base = OTHER; note = uracil
  modified_base 136..137: mod_base = OTHER; note = uracil
  modified_base 141..142: mod_base = OTHER; note = uracil
  modified_base 144..145: mod_base = OTHER; note = uracil
  modified_base 149: mod_base = OTHER; note = uracil
  modified_base 152: mod_base = OTHER; note = uracil
  modified_base 156..157: mod_base = OTHER; note = uracil
  modified_base 163: mod_base = OTHER; note = uracil
  modified_base 165: mod_base = OTHER; note = uracil
  modified_base 168: mod_base = OTHER; note = uracil
  modified_base 173: mod_base = OTHER; note = uracil
  modified_base 179: mod_base = OTHER; note = uracil
  modified_base 181: mod_base = OTHER; note = uracil
  modified_base 184: mod_base = OTHER; note = uracil
  modified_base 186: mod_base = OTHER; note = uracil
  modified_base 198: mod_base = OTHER; note = uracil
  modified_base 200: mod_base = OTHER; note = uracil
  modified_base 204..205: mod_base = OTHER; note = uracil
  modified_base 208..210: mod_base = OTHER; note = uracil
  modified_base 213..214: mod_base = OTHER; note = uracil
  modified_base 221: mod_base = OTHER; note = uracil
  modified_base 226..230: mod_base = OTHER; note = uracil
  modified_base 238: mod_base = OTHER; note = uracil
  modified_base 240..241: mod_base = OTHER; note = uracil
  modified_base 250: mod_base = OTHER; note = uracil
  modified_base 257..258: mod_base = OTHER; note = uracil
  modified_base 261: mod_base = OTHER; note = uracil
  modified_base 266..267: mod_base = OTHER; note = uracil
  modified_base 272: mod_base = OTHER; note = uracil
  modified_base 274: mod_base = OTHER; note = uracil
  modified_base 278..279: mod_base = OTHER; note = uracil
  modified_base 286: mod_base = OTHER; note = uracil
  modified_base 288..289: mod_base = OTHER; note = uracil
  modified_base 298..300: mod_base = OTHER; note = uracil
  modified_base 2: mod_base = m5c
  modified_base 89: mod_base = m5c
  modified_base 120: mod_base = m5c
  modified_base 187: mod_base = m5c
  modified_base 211: mod_base = m5c
  variation 150: note = CpG site, residue is C if methylated or T(=U) if unmethylated
tcgggtttttaaggtgatatttgtttgtgataatttttaaaatataaaaaagaaaaaagttttagaatagaaatatttttgggttgggcgaggttttggttgtggtagttagtgttaggcgtggttgatgtttatttttttttttttgtygttggttaggggtttagttagattaggtttttttttcggtgggatagtattgatttttttcgttagggttttgagtttttaggtgggtattttggaggtttgtggttttgttgtgttaatttataggtttggaagtattagagggtgttt

SEQ ID NO: 547 - DNA, 300 bp, synthetic construct
  source 1..300: mol_type = other DNA
  modified_base 1: mod_base = OTHER; note = uracil
  modified_base 3: mod_base = OTHER; note = uracil
  modified_base 15: mod_base = OTHER; note = uracil
  modified_base 23: mod_base = OTHER; note = uracil
  modified_base 32: mod_base = OTHER; note = uracil
  modified_base 35: mod_base = OTHER; note = uracil
  modified_base 38: mod_base = OTHER; note = uracil
  modified_base 41: mod_base = OTHER; note = uracil
  modified_base 46: mod_base = OTHER; note = uracil
  modified_base 54: mod_base = OTHER; note = uracil
  modified_base 63: mod_base = OTHER; note = uracil
  modified_base 66..68: mod_base = OTHER; note = uracil
  modified_base 71..72: mod_base = OTHER; note = uracil
  modified_base 74: mod_base = OTHER; note = uracil
  modified_base 79: mod_base = OTHER; note = uracil
  modified_base 82..84: mod_base = OTHER; note = uracil
  modified_base 86..87: mod_base = OTHER; note = uracil
  modified_base 89..90: mod_base = OTHER; note = uracil
  modified_base 92..93: mod_base = OTHER; note = uracil
  modified_base 96..97: mod_base = OTHER; note = uracil
  modified_base 101..102: mod_base = OTHER; note = uracil
  modified_base 111..112: mod_base = OTHER; note = uracil
  modified_base 118..120: mod_base = OTHER; note = uracil
  modified_base 122..123: mod_base = OTHER; note = uracil
  modified_base 129: mod_base = OTHER; note = uracil
  modified_base 136: mod_base = OTHER; note = uracil
  modified_base 140: mod_base = OTHER; note = uracil
  modified_base 145: mod_base = OTHER; note = uracil
  modified_base 149: mod_base = OTHER; note = uracil
  modified_base 163: mod_base = OTHER; note = uracil
  modified_base 168..170: mod_base = OTHER; note = uracil
  modified_base 176: mod_base = OTHER; note = uracil
  modified_base 188..190: mod_base = OTHER; note = uracil
  modified_base 201..203: mod_base = OTHER; note = uracil
  modified_base 210: mod_base = OTHER; note = uracil
  modified_base 212..213: mod_base = OTHER; note = uracil
  modified_base 220: mod_base = OTHER; note = uracil
  modified_base 237: mod_base = OTHER; note = uracil
  modified_base 239: mod_base = OTHER; note = uracil
  modified_base 242: mod_base = OTHER; note = uracil
  modified_base 247..249: mod_base = OTHER; note = uracil
  modified_base 252..253: mod_base = OTHER; note = uracil
  modified_base 256: mod_base = OTHER; note = uracil
  modified_base 263: mod_base = OTHER; note = uracil
  modified_base 265..266: mod_base = OTHER; note = uracil
  modified_base 276: mod_base = OTHER; note = uracil
  modified_base 278: mod_base = OTHER; note = uracil
  modified_base 291: mod_base = OTHER; note = uracil
  modified_base 298: mod_base = OTHER; note = uracil
  modified_base 30: mod_base = m5c
  modified_base 43: mod_base = m5c
  modified_base 52: mod_base = m5c
  modified_base 69: mod_base = m5c
  modified_base 80: mod_base = m5c
  modified_base 94: mod_base = m5c
  modified_base 127: mod_base = m5c
  modified_base 130: mod_base = m5c
  modified_base 142: mod_base = m5c
  modified_base 156: mod_base = m5c
  modified_base 181: mod_base = m5c
  modified_base 191: mod_base = m5c
  modified_base 194: mod_base = m5c
  modified_base 206: mod_base = m5c
  modified_base 214: mod_base = m5c
  modified_base 217: mod_base = m5c
  modified_base 240: mod_base = m5c
  modified_base 250: mod_base = m5c
  modified_base 254: mod_base = m5c
  modified_base 258: mod_base = m5c
  modified_base 281: mod_base = m5c
  modified_base 283: mod_base = m5c
  modified_base 285: mod_base = m5c
  variation 151: note = CpG site, residue is C if methylated or T(=U) if unmethylated
tttatggagaggagtagagatgtaggaaacgtaatagtagtacggtagaaacgtaggagaaatagtttcgttttagagtcgtttattttttttcgttatgttaggaagggttagtgtttttttagacgtcggtgattgttacgttagataygtgacgtgtggttgtgtttagatttttggcggtgagtttcggcgagggatttagcggtttttcggcgtttggtttagggggggattttcgtaagatttcgttcgtacgtggtttttgtgaggggtattgcgcgcgaaggttgtggtttg

SEQ ID NO: 548 - DNA, 300 bp, synthetic construct
  source 1..300: mol_type = other DNA
  modified_base 1: mod_base = OTHER; note = uracil
  modified_base 5..6: mod_base = OTHER; note = uracil
  modified_base 8: mod_base = OTHER; note = uracil
  modified_base 11..12: mod_base = OTHER; note = uracil
  modified_base 21: mod_base = OTHER; note = uracil
  modified_base 26..29: mod_base = OTHER; note = uracil
  modified_base 31: mod_base = OTHER; note = uracil
  modified_base 33: mod_base = OTHER; note = uracil
  modified_base 39..40: mod_base = OTHER; note = uracil
  modified_base 56: mod_base = OTHER; note = uracil
  modified_base 67..73: mod_base = OTHER; note = uracil
  modified_base 78..79: mod_base = OTHER; note = uracil
  modified_base 85: mod_base = OTHER; note = uracil
  modified_base 93: mod_base = OTHER; note = uracil
  modified_base 96: mod_base = OTHER; note = uracil
  modified_base 102..104: mod_base = OTHER; note = uracil
  modified_base 108: mod_base = OTHER; note = uracil
  modified_base 114: mod_base = OTHER; note = uracil
  modified_base 116: mod_base = OTHER; note = uracil
  modified_base 118: mod_base = OTHER; note = uracil
  modified_base 121..122: mod_base = OTHER; note = uracil
  modified_base 129: mod_base = OTHER; note = uracil
  modified_base 134: mod_base = OTHER; note = uracil
  modified_base 136: mod_base = OTHER; note = uracil
  modified_base 139..140: mod_base = OTHER; note = uracil
  modified_base 142: mod_base = OTHER; note = uracil
  modified_base 147: mod_base = OTHER; note = uracil
  modified_base 154: mod_base = OTHER; note = uracil
  modified_base 163: mod_base = OTHER; note = uracil
  modified_base 167: mod_base = OTHER; note = uracil
  modified_base 169: mod_base = OTHER; note = uracil
  modified_base 176: mod_base = OTHER; note = uracil
  modified_base 185: mod_base = OTHER; note = uracil
  modified_base 187: mod_base = OTHER; note = uracil
  modified_base 191..193: mod_base = OTHER; note = uracil
  modified_base 196..197: mod_base = OTHER; note = uracil
  modified_base 201: mod_base = OTHER; note = uracil
  modified_base 223: mod_base = OTHER; note = uracil
  modified_base 225: mod_base = OTHER; note = uracil
  modified_base 236: mod_base = OTHER; note = uracil
  modified_base 242: mod_base = OTHER; note = uracil
  modified_base 244..245: mod_base = OTHER; note = uracil
  modified_base 253: mod_base = OTHER; note = uracil
  modified_base 256: mod_base = OTHER; note = uracil
  modified_base 261: mod_base = OTHER; note = uracil
  modified_base 264: mod_base = OTHER; note = uracil
  modified_base 275..276: mod_base = OTHER; note = uracil
  modified_base 279: mod_base = OTHER; note = uracil
  modified_base 282: mod_base = OTHER; note = uracil
  modified_base 284: mod_base = OTHER; note = uracil
  modified_base 287: mod_base = OTHER; note = uracil
  modified_base 289..290: mod_base = OTHER; note = uracil
  modified_base 292: mod_base = OTHER; note = uracil
  modified_base 294..295: mod_base = OTHER; note = uracil
  modified_base 15: mod_base = m5c
  modified_base 17: mod_base = m5c
  modified_base 19: mod_base = m5c
  modified_base 42: mod_base = m5c
  modified_base 46: mod_base = m5c
  modified_base 50: mod_base = m5c
  modified_base 60: mod_base = m5c
  modified_base 83: mod_base = m5c
  modified_base 86: mod_base = m5c
  modified_base 94: mod_base = m5c
  modified_base 106: mod_base = m5c
  modified_base 109: mod_base = m5c
  modified_base 119: mod_base = m5c
  modified_base 144: mod_base = m5c
  modified_base 158: mod_base = m5c
  modified_base 170: mod_base = m5c
  modified_base 173: mod_base = m5c
  modified_base 206: mod_base = m5c
  modified_base 220: mod_base = m5c
  modified_base 231: mod_base = m5c
  modified_base 248: mod_base = m5c
  modified_base 257: mod_base = m5c
  modified_base 270: mod_base = m5c
  variation 149: note = CpG site, residue is C if methylated or T(=U) if unmethylated
tagattatagttttcgcgcgtagtgttttttataggagttacgtgcgggcggggttttgcggagatttttttttaaattagacgtcgggagatcgttgggtttttcgtcggggtttatcgttaagaatttgggtatagttatacgttaygtgtttgacgtgatagttatcggcgtttggagggatattggttttttttggtatggcgggaggaggtgggcggttttgaggcggggttgttttttttgcgtttttgtcgtgttgttgttgcgttttttgtatttttgtttttttttatgag

SEQ ID NO: 549 - DNA, 300 bp, synthetic construct
  source 1..300: mol_type = other DNA
  modified_base 1: mod_base = OTHER; note = uracil
  modified_base 3: mod_base = OTHER; note = uracil
  modified_base 5..6: mod_base = OTHER; note = uracil
  modified_base 8: mod_base = OTHER; note = uracil
  modified_base 13: mod_base = OTHER; note = uracil
  modified_base 17..18: mod_base = OTHER; note = uracil
  modified_base 20..21: mod_base = OTHER; note = uracil
  modified_base 30: mod_base = OTHER; note = uracil
  modified_base 35..36: mod_base = OTHER; note = uracil
  modified_base 62: mod_base = OTHER; note = uracil
  modified_base 65: mod_base = OTHER; note = uracil
  modified_base 68: mod_base = OTHER; note = uracil
  modified_base 82: mod_base = OTHER; note = uracil
  modified_base 84..87: mod_base = OTHER; note = uracil
  modified_base 89: mod_base = OTHER; note = uracil
  modified_base 91..95: mod_base = OTHER; note = uracil
  modified_base 101: mod_base = OTHER; note = uracil
  modified_base 103..104: mod_base = OTHER; note = uracil
  modified_base 106: mod_base = OTHER; note = uracil
  modified_base 114: mod_base = OTHER; note = uracil
  modified_base 120..121: mod_base = OTHER; note = uracil
  modified_base 124..126: mod_base = OTHER; note = uracil
  modified_base 131..132: mod_base = OTHER; note = uracil
  modified_base 137..138: mod_base = OTHER; note = uracil
  modified_base 146: mod_base = OTHER; note = uracil
  modified_base 150..151: mod_base = OTHER; note = uracil
  modified_base 161..162: mod_base = OTHER; note = uracil
  modified_base 165..166: mod_base = OTHER; note = uracil
  modified_base 169: mod_base = OTHER; note = uracil
  modified_base 175: mod_base = OTHER; note = uracil
  modified_base 181: mod_base = OTHER; note = uracil
  modified_base 183: mod_base = OTHER; note = uracil
  modified_base 190: mod_base = OTHER; note = uracil
  modified_base 194: mod_base = OTHER; note = uracil
  modified_base 203..204: mod_base = OTHER; note = uracil
  modified_base 208..211: mod_base = OTHER; note = uracil
  modified_base 213..215: mod_base = OTHER; note = uracil
  modified_base 223..224: mod_base = OTHER; note = uracil
  modified_base 226: mod_base = OTHER; note = uracil
  modified_base 232: mod_base = OTHER; note = uracil
  modified_base 240..242: mod_base = OTHER; note = uracil
  modified_base 247: mod_base = OTHER; note = uracil
  modified_base 250: mod_base = OTHER; note = uracil
  modified_base 253..254: mod_base = OTHER; note = uracil
  modified_base 257: mod_base = OTHER; note = uracil
  modified_base 264..265: mod_base = OTHER; note = uracil
  modified_base 269: mod_base = OTHER; note = uracil
  modified_base 273: mod_base = OTHER; note = uracil
  modified_base 275..277: mod_base = OTHER; note = uracil
  modified_base 279: mod_base = OTHER; note = uracil
  modified_base 284..286: mod_base = OTHER; note = uracil
  modified_base 294..296: mod_base = OTHER; note = uracil
  modified_base 299..300: mod_base = OTHER; note = uracil
  modified_base 57: mod_base = m5c
  modified_base 73: mod_base = m5c
  modified_base 115: mod_base = m5c
  modified_base 171: mod_base = m5c
  modified_base 184: mod_base = m5c
  modified_base 191: mod_base = m5c
  modified_base 217: mod_base = m5c
  modified_base 227: mod_base = m5c
  modified_base 244: mod_base = m5c
  modified_base 255: mod_base = m5c
  variation 144: note = CpG site, residue is C if methylated or T(=U) if unmethylated
  variation 148: note = CpG site, residue is C if methylated or T(=U) if unmethylated
  variation 156: note = CpG site, residue is C if methylated or T(=U) if unmethylated
ttttttattgtgtaggttatttgtagggatagtgttagtgggtgtaggagaggtggcgaggttgtagtagtgcgggatgggttttttatatttttaaatattttatatggggttcggggtttttttaggatttgggttaggtgygtaygtttgggyggggttagttagttcgtgttgagttatcgggtgtcgttagtgagggtttggttttattttcgggaattatcggtgttggtttttttacggttgttgttcgttgtgggttttgttgttatttataaggttttgggaggttttgtt

SEQ ID NO: 550 - DNA, 300 bp, synthetic construct
  source 1..300: mol_type = other DNA
  modified_base 3: mod_base = OTHER; note = uracil
  modified_base 8..9: mod_base = OTHER; note = uracil
  modified_base 11..13: mod_base = OTHER; note = uracil
  modified_base 18..19: mod_base = OTHER; note = uracil
  modified_base 30: mod_base = OTHER; note = uracil
  modified_base 33: mod_base = OTHER; note = uracil
  modified_base 38..40: mod_base = OTHER; note = uracil
  modified_base 42: mod_base = OTHER; note = uracil
  modified_base 49: mod_base = OTHER; note = uracil
  modified_base 52: mod_base = OTHER; note = uracil
  modified_base 55: mod_base = OTHER; note = uracil
  modified_base 66..67: mod_base = OTHER; note = uracil
  modified_base 70: mod_base = OTHER; note = uracil
  modified_base 72: mod_base = OTHER; note = uracil
  modified_base 81..82: mod_base = OTHER; note = uracil
  modified_base 94..95: mod_base = OTHER; note = uracil
  modified_base 99..101: mod_base = OTHER; note = uracil
  modified_base 103: mod_base = OTHER; note = uracil
  modified_base 105: mod_base = OTHER; note = uracil
  modified_base 112: mod_base = OTHER; note = uracil
  modified_base 114..115: mod_base = OTHER; note = uracil
  modified_base 122: mod_base = OTHER; note = uracil
  modified_base 124: mod_base = OTHER; note = uracil
  modified_base 127: mod_base = OTHER; note = uracil
  modified_base 133: mod_base = OTHER; note = uracil
  modified_base 137: mod_base = OTHER; note = uracil
  modified_base 141..143: mod_base = OTHER; note = uracil
  modified_base 146..148: mod_base = OTHER; note = uracil
  modified_base 158: mod_base = OTHER; note = uracil
  modified_base 160..161: mod_base = OTHER; note = uracil
  modified_base 165..167: mod_base = OTHER; note = uracil
  modified_base 172..173: mod_base = OTHER; note = uracil
  modified_base 182..184: mod_base = OTHER; note = uracil
  modified_base 189..192: mod_base = OTHER; note = uracil
  modified_base 220..222: mod_base = OTHER; note = uracil
  modified_base 225..226: mod_base = OTHER; note = uracil
  modified_base 229: mod_base = OTHER; note = uracil
  modified_base 231: mod_base = OTHER; note = uracil
  modified_base 234: mod_base = OTHER; note = uracil
  modified_base 237: mod_base = OTHER; note = uracil
  modified_base 240..241: mod_base = OTHER; note = uracil
  modified_base 245..246: mod_base = OTHER; note = uracil
  modified_base 248..249: mod_base = OTHER; note = uracil
  modified_base 251: mod_base = OTHER; note = uracil
  modified_base 253..254: mod_base = OTHER; note = uracil
  modified_base 257: mod_base = OTHER; note = uracil
  modified_base 259..261: mod_base = OTHER; note = uracil
  modified_base 263: mod_base = OTHER; note = uracil
  modified_base 267: mod_base = OTHER; note = uracil
  modified_base 269: mod_base = OTHER; note = uracil
  modified_base 273..275: mod_base = OTHER; note = uracil
  modified_base 278: mod_base = OTHER; note = uracil
  modified_base 285..286: mod_base = OTHER; note = uracil
  modified_base 289: mod_base = OTHER; note = uracil
  modified_base 291: mod_base = OTHER; note = uracil
  modified_base 45: mod_base = m5c
  modified_base 56: mod_base = m5c
  modified_base 73: mod_base = m5c
  modified_base 83: mod_base = m5c
  modified_base 109: mod_base = m5c
  modified_base 116: mod_base = m5c
  modified_base 129: mod_base = m5c
  modified_base 185: mod_base = m5c
  modified_base 227: mod_base = m5c
  modified_base 243: mod_base = m5c
  variation 144: note = CpG site, residue is C if methylated or T(=U) if unmethylated
  variation 152: note = CpG site, residue is C if methylated or T(=U) if unmethylated
  variation 156: note = CpG site, residue is C if methylated or T(=U) if unmethylated
ggtagggttttttagggttttgtgggtgatagtaaggtttatagcgggtagtagtcgtgggaaaattagtatcggtggttttcgagggtggggttaggtttttattgacggtattcggtgatttagtacgagttggttggtttygtttaggygtgygtatttggtttaggttttgggaaggtttcggattttatgtggagtatttgggggtgtggggagtttatttcgtattgttgtagtttcgttattttttttatatttattggtattgtttttataggtggtttgtatagtggagag

SEQ ID NO: 551 - DNA, 19 bp, synthetic construct
  source 1..19: mol_type = other DNA
gggagaagagattggaaaa

SEQ ID NO: 552 - DNA, 27 bp, synthetic construct
  source 1..27: mol_type = other DNA
ctaaaaacctaacactaacaacataat

SEQ ID NO: 553 - DNA, 20 bp, synthetic construct
  source 1..20: mol_type = other DNA
tgttgtttaaaatgttgttt

SEQ ID NO: 554 - DNA, 20 bp, synthetic construct
  source 1..20: mol_type = other DNA
aaccctaaataattcttctc

SEQ ID NO: 555 - DNA, 18 bp, synthetic construct
  source 1..18: mol_type = other DNA
gggttgggttgaggtttt

SEQ ID NO: 556 - DNA, 25 bp, synthetic construct
  source 1..25: mol_type = other DNA
acaccttacatctcatttacaactc

SEQ ID NO: 557 - DNA, 21 bp, synthetic construct
  source 1..21: mol_type = other DNA
aatttgtgaaaagtttgtgta

SEQ ID NO: 558 - DNA, 18 bp, synthetic construct
  source 1..18: mol_type = other DNA
cccaatcacctttaatct

SEQ ID NO: 559 - DNA, 20 bp, synthetic construct
  source 1..20: mol_type = other DNA
gttgggatttgaaatagtga

SEQ ID NO: 560 - DNA, 20 bp, synthetic construct
  source 1..20: mol_type = other DNA
cctccactcacctaaaactt

SEQ ID NO: 561 - DNA, 20 bp, synthetic construct
  source 1..20: mol_type = other DNA
ttggttagtgattatttatt

SEQ ID NO: 562 - DNA, 22 bp, synthetic construct
  source 1..22: mol_type = other DNA
aaaaattaatataaaattaaaa

SEQ ID NO: 563 - DNA, 19 bp, synthetic construct
  source 1..19: mol_type = other DNA
tttgtagggagttagggat

SEQ ID NO: 564 - DNA, 20 bp, synthetic construct
  source 1..20: mol_type = other DNA
tcctctatctcaccctaaat

SEQ ID NO: 565 - DNA, 23 bp, synthetic construct
  source 1..23: mol_type = other DNA
tttgattgaattatttgtgtatt

SEQ ID NO: 566 - DNA, 21 bp, synthetic construct
  source 1..21: mol_type = other DNA
actcccttactcctaaacact

SEQ ID NO: 567 - DNA, 19 bp, synthetic construct
  source 1..19: mol_type = other DNA
agtggagatggtagggaga

SEQ ID NO: 568 - DNA, 23 bp, synthetic construct
  source 1..23: mol_type = other DNA
cccaaaactaaaaccaaatataa

SEQ ID NO: 569 - DNA, 18 bp, synthetic construct
  source 1..18: mol_type = other DNA
ttgtggttaaatttattg

SEQ ID NO: 570 - DNA, 18 bp, synthetic construct
  source 1..18: mol_type = other DNA
acccaacaaaataatatc

SEQ ID NO: 571 - DNA, 22 bp, synthetic construct
  source 1..22: mol_type = other DNA
tgaggtagagttgtgtgtatat

SEQ ID NO: 572 - DNA, 21 bp, synthetic construct
  source 1..21: mol_type = other DNA
atcaatcaattctcattaaac

SEQ ID NO: 573 - DNA, 19 bp, synthetic construct
  source 1..19: mol_type = other DNA
ggaagttaggaagggttgt

SEQ ID NO: 574 - DNA, 21 bp, synthetic construct
  source 1..21: mol_type = other DNA
ctccaactccaactaaaactc

SEQ ID NO: 575 - DNA, 19 bp, synthetic construct
  source 1..19: mol_type = other DNA
ttgggtattgatttatttt

SEQ ID NO: 576 - DNA, 23 bp, synthetic construct
  source 1..23: mol_type = other DNA
aaattctacctacaaactataca

SEQ ID NO: 577 - DNA, 25 bp, synthetic construct
  source 1..25: mol_type = other DNA
aggatgaagtaataattaaatattg

SEQ ID NO: 578 - DNA, 19 bp, synthetic construct
  source 1..19: mol_type = other DNA
cccactctaccaactaaac

SEQ ID NO: 579 - DNA, 20 bp, synthetic construct
  source 1..20: mol_type = other DNA
aggtttgtgttagtataaat

SEQ ID NO: 580 - DNA, 24 bp, synthetic construct
  source 1..24: mol_type = other DNA
ttcttacctatataattaataata

SEQ ID NO: 581 - DNA, 19 bp, synthetic construct
  source 1..19: mol_type = other DNA
gttgggtgaattttattag

SEQ ID NO: 582 - DNA, 20 bp, synthetic construct
  source 1..20: mol_type = other DNA
tcaaaacctaaactctaaca

SEQ ID NO: 583 - DNA, 24 bp, synthetic construct
  source 1..24: mol_type = other DNA
ggattggttttatatagaaagtat

SEQ ID NO: 584 - DNA, 26 bp, synthetic construct
  source 1..26: mol_type = other DNA
caaataataaatcataactcttaact

SEQ ID NO: 585 - DNA, 18 bp, synthetic construct
  source 1..18: mol_type = other DNA
tggggtagttgatggttt

SEQ ID NO: 586 - DNA, 26 bp, synthetic construct
  source 1..26: mol_type = other DNA
ctttctaacaaaataaaaaaatttaa

SEQ ID NO: 587 - DNA, 28 bp, synthetic construct
  source 1..28: mol_type = other DNA
ttgtatttgaagtttgtagagatttata

SEQ ID NO: 588 - DNA, 19 bp, synthetic construct
  source 1..19: mol_type = other DNA
tttcctccaacaactcaat

SEQ ID NO: 589 - DNA, 27 bp, synthetic construct
  source 1..27: mol_type = other DNA
ttatgagtatgtagtagggttattata

SEQ ID NO: 590 - DNA, 22 bp, synthetic construct
  source 1..22: mol_type = other DNA
aaaatatcaaacaaatttatcc

SEQ ID NO: 591 - DNA, 23 bp, synthetic construct
  source 1..23: mol_type = other DNA
tggttgtttgttttttatgtatt

SEQ ID NO: 592 - DNA, 18 bp, synthetic construct
  source 1..18: mol_type = other DNA
tccctacctcccaaattc

SEQ ID NO: 593 - DNA, 23 bp, synthetic construct
  source 1..23: mol_type = other DNA
tatgatgattgttgtagtgtaga

SEQ ID NO: 594 - DNA, 22 bp, synthetic construct
  source 1..22: mol_type = other DNA
cctccctaataactaaaaatac

SEQ ID NO: 595 - DNA, 20 bp, synthetic construct
  source 1..20: mol_type = other DNA
ggtggttttgatatttagtg

SEQ ID NO: 596 - DNA, 20 bp, synthetic construct
  source 1..20: mol_type = other DNA
cccaattacctaacaaatta

SEQ ID NO: 597 - DNA, 19 bp, synthetic construct
  source 1..19: mol_type = other DNA
tgggataggtgtagatatg

SEQ ID NO: 598 - DNA, 23 bp, synthetic construct
  source 1..23: mol_type = other DNA
caacaaaaactaaaacactatac

SEQ ID NO: 599 - DNA, 18 bp, synthetic construct
  source 1..18: mol_type = other DNA
tttgggattggttatttt

SEQ ID NO: 600 - DNA, 20 bp, synthetic construct
  source 1..20: mol_type = other DNA
aaaccccttaactctatacc

SEQ ID NO: 601 - DNA, 22 bp, synthetic construct
  source 1..22: mol_type = other DNA
gatttttttgagaagagtatag

SEQ ID NO: 602 - DNA, 21 bp, synthetic construct
  source 1..21: mol_type = other DNA
aaccactaccacctaaatata

SEQ ID NO: 603 - DNA, 18 bp, synthetic construct
  source 1..18: mol_type = other DNA
ggaggatagggtgtgatt

SEQ ID NO: 604 - DNA, 27 bp, synthetic construct
  source 1..27: mol_type = other DNA
acatttttaactctaactaaaaataaa

SEQ ID NO: 605 - DNA, 18 bp, synthetic construct
  source 1..18: mol_type = other DNA
tggaaatgaggtgagttt

SEQ ID NO: 606 - DNA, 26 bp, synthetic construct
  source 1..26: mol_type = other DNA
aaaaaaaaataaaataacaataacta

SEQ ID NO: 607 - DNA, 19 bp, synthetic construct
  source 1..19: mol_type = other DNA
tggagagtttagtttgttt

SEQ ID NO: 608 - DNA, 19 bp, synthetic construct
  source 1..19: mol_type = other DNA
caaaaaaaaatctaacaac

SEQ ID NO: 609 - DNA, 20 bp, synthetic construct
  source 1..20: mol_type = other DNA
tgggttttagttatgtggtt

SEQ ID NO: 610 - DNA, 26 bp, synthetic construct
  source 1..26: mol_type = other DNA
atcaataatatccaacaaaataatat

SEQ ID NO: 611 - DNA, 27 bp, synthetic construct
  source 1..27: mol_type = other DNA
tttttttagtttttgtatatatattag

SEQ ID NO: 612 - DNA, 19 bp, synthetic construct
  source 1..19: mol_type = other DNA
acccaaataatcaactctt

SEQ ID NO: 613 - DNA, 18 bp, synthetic construct
  source 1..18: mol_type = other DNA
gtggtttttggagattta

SEQ ID NO: 614 - DNA, 25 bp, synthetic construct
  source 1..25: mol_type = other DNA
aaacaaactacaaataaaataatac

SEQ ID NO: 615 - DNA, 19 bp, synthetic construct
  source 1..19: mol_type = other DNA
gggttataggtttgagtta

SEQ ID NO: 616 - DNA, 20 bp, synthetic construct
  source 1..20: mol_type = other DNA
ccattaaaaaaaataaaatc

SEQ ID NO: 617 - DNA, 23 bp, synthetic construct
  source 1..23: mol_type = other DNA
ttggtagatttagtaaatttatt

SEQ ID NO: 618 - DNA, 22 bp, synthetic construct
  source 1..22: mol_type = other DNA
aaacttaaacaaccctatatac

SEQ ID NO: 619 - DNA, 27 bp, synthetic construct
  source 1..27: mol_type = other DNA
atggttttaaagagtagtagtatagtt

SEQ ID NO: 620 - DNA, 20 bp, synthetic construct
  source 1..20: mol_type = other DNA
aaatttactcatcccacttc

SEQ ID NO: 621 - DNA, 18 bp, synthetic construct
  source 1..18: mol_type = other DNA
aggggttgggatattgtt

SEQ ID NO: 622 - DNA, 25 bp, synthetic construct
  source 1..25: mol_type = other DNA
aaaaatttctcctacaaaaaactaa

SEQ ID NO: 623 - DNA, 20 bp, synthetic construct
  source 1..20: mol_type = other DNA
atgggtgtttggaattttta

SEQ ID NO: 624 - DNA, 25 bp, synthetic construct
  source 1..25: mol_type = other DNA
ctacctcaacctcctaaataactaa

SEQ ID NO: 625 - DNA, 22 bp, synthetic construct
  source 1..22: mol_type = other DNA
gtgttttgtggtaaagatatag

SEQ ID NO: 626 - DNA, 24 bp, synthetic construct
  source 1..24: mol_type = other DNA
attcttaaattaattcaactacat

SEQ ID NO: 627 - DNA, 20 bp, synthetic construct
  source 1..20: mol_type = other DNA
tgggggtaaaagttatagtt

SEQ ID NO: 628 - DNA, 21 bp, synthetic construct
  source 1..21: mol_type = other DNA
aaaaaacaaaaaaccaaatac

SEQ ID NO: 629 - DNA, 19 bp, synthetic construct
  source 1..19: mol_type = other DNA
gttttttggttagtgtgtt

SEQ ID NO: 630 - DNA, 22 bp, synthetic construct
  source 1..22: mol_type = other DNA
ccccatacttctatactataat

SEQ ID NO: 631 - DNA, 23 bp, synthetic construct
  source 1..23: mol_type = other DNA
ttgttgtttttaaagaaattata

SEQ ID NO: 632 - DNA, 24 bp, synthetic construct
  source 1..24: mol_type = other DNA
atcatctaaacttaactcatctaa

SEQ ID NO: 633 - DNA, 20 bp, synthetic construct
  source 1..20: mol_type = other DNA
atttttgggtgttttatatt

SEQ ID NO: 634 - DNA, 18 bp, synthetic construct
  source 1..18: mol_type = other DNA
aaacctcaaacaataaca

SEQ ID NO: 635 - DNA, 24 bp, synthetic construct
  source 1..24: mol_type = other DNA
attaaggatatttaggagagtaag

SEQ ID NO: 636 - DNA, 20 bp, synthetic construct
  source 1..20: mol_type = other DNA
acaccacaacttcaaactac

SEQ ID NO: 637 - DNA, 23 bp, synthetic construct
  source 1..23: mol_type = other DNA
tgaggaagagagaagagatgata

SEQ ID NO: 638 - DNA, 30 bp, synthetic construct
  source 1..30: mol_type = other DNA
aaaactaaactataaaacaaaacaaaacta

SEQ ID NO: 639 - DNA, 20 bp, synthetic construct
  source 1..20: mol_type = other DNA
ggtggaggtgttttttatag

SEQ ID NO: 640 - DNA, 23 bp, synthetic construct
  source 1..23: mol_type = other DNA
ccaaatactactttcaaaataca

SEQ ID NO: 641 - DNA, 21 bp, synthetic construct
  source 1..21: mol_type = other DNA
atggattattattgtgttatt

SEQ ID NO: 642 - DNA, 19 bp, synthetic construct
  source 1..19: mol_type = other DNA
catctcaacctcatactaa

SEQ ID NO: 643 - DNA, 22 bp, synthetic construct
  source 1..22: mol_type = other DNA
ggatgatttagtagggattgag

SEQ ID NO: 644 - DNA, 23 bp, synthetic construct
  source 1..23: mol_type = other DNA
ccaaataaaaaccattctctaac

SEQ ID NO: 645 - DNA, 24 bp, synthetic construct
  source 1..24: mol_type = other DNA
ttggattaagtatttttgatatta

SEQ ID NO: 646 - DNA, 23 bp, synthetic construct
  source 1..23: mol_type = other DNA
tccctaaaccatatattactaaa

SEQ ID NO: 647 - DNA, 22 bp, synthetic construct
  source 1..22: mol_type = other DNA
gggtagtttggtgattattatt

SEQ ID NO: 648 - DNA, 19 bp, synthetic construct
  source 1..19: mol_type = other DNA
cccttccctactcacaata

SEQ ID NO: 649 - DNA, 23 bp, synthetic construct
  source 1..23: mol_type = other DNA
atttggttagtgatttagttatt

SEQ ID NO: 650 - DNA, 21 bp, synthetic construct
  source 1..21: mol_type = other DNA
tcccacttaaaaaattctata

SEQ ID NO: 651 - DNA, 21 bp, synthetic construct
  source 1..21: mol_type = other DNA
agtggggaaggtaattgttat

SEQ ID NO: 652 - DNA, 30 bp, synthetic construct
  source 1..30: mol_type = other DNA
ctttctaataaaaatttactaaaacctcta

SEQ ID NO: 653 - DNA, 24 bp, synthetic construct
  source 1..24: mol_type = other DNA
tttggttagttttatttttgattg

SEQ ID NO: 654 - DNA, 20 bp, synthetic construct
  source 1..20: mol_type = other DNA
attcctccctatccctattc

SEQ ID NO: 655 - DNA, 19 bp, synthetic construct
  source 1..19: mol_type = other DNA
gggataggggttagagtaa

SEQ ID NO: 656 - DNA, 20 bp, synthetic construct
  source 1..20: mol_type = other DNA
tccataaaaacaaaacactc

SEQ ID NO: 657 - DNA, 25 bp, synthetic construct
  source 1..25: mol_type = other DNA
ttttttagtatgagttataaattat

SEQ ID NO: 658 - DNA, 23 bp, synthetic construct
  source 1..23: mol_type = other DNA
aaaacaaaatctacctatatatt

SEQ ID NO: 659 - DNA, 23 bp, synthetic construct
  source 1..23: mol_type = other DNA
ttttattaataaagtaggtatga

SEQ ID NO: 660 - DNA, 20 bp, synthetic construct
  source 1..20: mol_type = other DNA
acctttctcaaaattactaa

SEQ ID NO: 661 - DNA, 22 bp, synthetic construct
  source 1..22: mol_type = other DNA
atagggttgaggttagagttat

SEQ ID NO: 662 - DNA, 18 bp, synthetic construct
  source 1..18: mol_type = other DNA
cctcctctccacaataaa

SEQ ID NO: 663 - DNA, 26 bp, synthetic construct
  source 1..26: mol_type = other DNA
tttaagtttttttttagttttgtagt

SEQ ID NO: 664 - DNA, 18 bp, synthetic construct
  source 1..18: mol_type = other DNA
ccccatcctctctatctc

SEQ ID NO: 665 - DNA, 26 bp, synthetic construct
  source 1..26: mol_type = other DNA
aaatttaaaatttagaggtttttata

SEQ ID NO: 666 - DNA, 24 bp, synthetic construct
  source 1..24: mol_type = other DNA
aaacttcacacacaaatctatatt

SEQ ID NO: 667 - DNA, 25 bp, synthetic construct
  source 1..25: mol_type = other DNA
tttttattttattttttatttttaa

SEQ ID NO: 668 - DNA, 24 bp, synthetic construct
  source 1..24: mol_type = other DNA
atacctccctaattatattattaa

SEQ ID NO: 669 - DNA, 25 bp, synthetic construct
  source 1..25: mol_type = other DNA
ttttagaatatttaaagaagttagt

SEQ ID NO: 670 - DNA, 19 bp, synthetic construct
  source 1..19: mol_type = other DNA
taacctcactttcctatca

SEQ ID NO: 671 - DNA, 26 bp, synthetic construct
  source 1..26: mol_type = other DNA
aatttagtataagatttgatttgtta

SEQ ID NO: 672 - DNA, 20 bp, synthetic construct
  source 1..20: mol_type = other DNA
ccacctactccttcctatac

SEQ ID NO: 673 - DNA, 21 bp, synthetic construct
  source 1..21: mol_type = other DNA
ttttttgaaattgtatgttat

SEQ ID NO: 674 - DNA, 21 bp, synthetic construct
  source 1..21: mol_type = other DNA
caaatccttaaaattctataa

SEQ ID NO: 675 - DNA, 18 bp, synthetic construct
  source 1..18: mol_type = other DNA
tttgaagtggtgttttag

SEQ ID NO: 676 - DNA, 18 bp, synthetic construct
  source 1..18: mol_type = other DNA
ccaaaattcttccatact

SEQ ID NO: 677 - DNA, 20 bp, synthetic construct
  source 1..20: mol_type = other DNA
tgggtatttagttttttgtg

SEQ ID NO: 678 - DNA, 23 bp, synthetic construct
  source 1..23: mol_type = other DNA
aacaactacctccttttactaat

SEQ ID NO: 679 - DNA, 19 bp, synthetic construct
  source 1..19: mol_type = other DNA
tatggtaggaggtggagtt

SEQ ID NO: 680 - DNA, 19 bp, synthetic construct
  source 1..19: mol_type = other DNA
cccaattttaaaacaatac

SEQ ID NO: 681 - DNA, 22 bp, synthetic construct
  source 1..22: mol_type = other DNA
agaggaagtaaggttattagtt

SEQ ID NO: 682 - DNA, 20 bp, synthetic construct
  source 1..20: mol_type = other DNA
accaaacaaacaatatctaa

SEQ ID NO: 683 - DNA, 24 bp, synthetic construct
  source 1..24: mol_type = other DNA
ggttttaattatgatttaattaga

SEQ ID NO: 684 - DNA, 22 bp, synthetic construct
  source 1..22: mol_type = other DNA
cctacactcaaatttacctcta

SEQ ID NO: 685 - DNA, 23 bp, synthetic construct
  source 1..23: mol_type = other DNA
aatgggtagttgatataattatt

SEQ ID NO: 686 - DNA, 21 bp, synthetic construct
  source 1..21: mol_type = other DNA
cacaaaatcctaaaactaaaa

SEQ ID NO: 687 - DNA, 22 bp, synthetic construct
  source 1..22: mol_type = other DNA
aggattagtggaaatgaaaata

SEQ ID NO: 688 - DNA, 23 bp, synthetic construct
  source 1..23: mol_type = other DNA
taacctcaaaacaacttctaaac

SEQ ID NO: 689 - DNA, 25 bp, synthetic construct
  source 1..25: mol_type = other DNA
ttttttttatagagaagtattttag

SEQ ID NO: 690 - DNA, 18 bp, synthetic construct
  source 1..18: mol_type = other DNA
cccattacaaaactatcc

SEQ ID NO: 691 - DNA, 19 bp, synthetic construct
  source 1..19: mol_type = other DNA
ggtgagtttgtggttagtg

SEQ ID NO: 692 - DNA, 22 bp, synthetic construct
  source 1..22: mol_type = other DNA
ttttctaaaaaaatccaatcta

SEQ ID NO: 693 - DNA, 19 bp, synthetic construct
  source 1..19: mol_type = other DNA
aatggataggttggaatag

SEQ ID NO: 694 - DNA, 23 bp, synthetic construct
  source 1..23: mol_type = other DNA
aaaaaaaaaaaaaaactaattac

SEQ ID NO: 695 - DNA, 22 bp, synthetic construct
  source 1..22: mol_type = other DNA
gagttatttagtttggttaggt

SEQ ID NO: 696 - DNA, 24 bp, synthetic construct
  source 1..24: mol_type = other DNA
actcaacttaaaaaatcactatac

SEQ ID NO: 697 - DNA, 22 bp, synthetic construct
  source 1..22: mol_type = other DNA
ttttttttggttttttggtttt

SEQ ID NO: 698 - DNA, 18 bp, synthetic construct
  source 1..18: mol_type = other DNA
tcccccacacccatataa

SEQ ID NO: 699 - DNA, 25 bp, synthetic construct
  source 1..25: mol_type = other DNA
ttaaaaaaaagtataatgagtagga

SEQ ID NO: 700 - DNA, 19 bp, synthetic construct
  source 1..19: mol_type = other DNA
cccacaaaaactctctaca

SEQ ID NO: 701 - DNA, 24 bp, synthetic construct
  source 1..24: mol_type = other DNA
aaaggaggttgagttagaaagtag

SEQ ID NO: 702 - DNA, 26 bp, synthetic construct
  source 1..26: mol_type = other DNA
aactatttaacttacttaaccacacc

SEQ ID NO: 703 - DNA, 25 bp, synthetic construct
  source 1..25: mol_type = other DNA
ggtgtggttaagtaagttaaatagt

SEQ ID NO: 704 - DNA, 18 bp, synthetic construct
  source 1..18: mol_type = other DNA
taccccttcctcttcaac

SEQ ID NO: 705 - DNA, 24 bp, synthetic construct
  source 1..24: mol_type = other DNA
ttttgatatgatttatgattatat

SEQ ID NO: 706 - DNA, 20 bp, synthetic construct
  source 1..20: mol_type = other DNA
ttttccactaaacaacacta

SEQ ID NO: 707 - DNA, 19 bp, synthetic construct
  source 1..19: mol_type = other DNA
tttgagggttgttttagat

SEQ ID NO: 708 - DNA, 26 bp, synthetic construct
  source 1..26: mol_type = other DNA
actcacaaaaaataactaataactat

SEQ ID NO: 709 - DNA, 21 bp, synthetic construct
  source 1..21: mol_type = other DNA
aaaggaggtaggggagatata

SEQ ID NO: 710 - DNA, 23 bp, synthetic construct
  source 1..23: mol_type = other DNA
tcaaaataaaaaccaaaattctc

SEQ ID NO: 711 - DNA, 22 bp, synthetic construct
  source 1..22: mol_type = other DNA
aggttaagttggtagaggtaga

SEQ ID NO: 712 - DNA, 25 bp, synthetic construct
  source 1..25: mol_type = other DNA
caaactctaaactcaaaatatattc

SEQ ID NO: 713 - DNA, 24 bp, synthetic construct
  source 1..24: mol_type = other DNA
tttttattttagttttttgagtag

SEQ ID NO: 714 - DNA, 20 bp, synthetic construct
  source 1..20: mol_type = other DNA
ccctacaacactcctatcta

SEQ ID NO: 715 - DNA, 19 bp, synthetic construct
  source 1..19: mol_type = other DNA
tttggagttaggttgatag

SEQ ID NO: 716 - DNA, 21 bp, synthetic construct
  source 1..21: mol_type = other DNA
caacaatactctcacttacac

SEQ ID NO: 717 - DNA, 25 bp, synthetic construct
  source 1..25: mol_type = other DNA
agaaagatttttaaatatttttaat

SEQ ID NO: 718 - DNA, 21 bp, synthetic construct
  source 1..21: mol_type = other DNA
aaacctctaatacacaacaaa

SEQ ID NO: 719 - DNA, 23 bp, synthetic construct
  source 1..23: mol_type = other DNA
ttttgagttttttttttaagtat

SEQ ID NO: 720 - DNA, 22 bp, synthetic construct
  source 1..22: mol_type = other DNA
caaacaaaacaacacttaatac

SEQ ID NO: 721 - DNA, 19 bp, synthetic construct
  source 1..19: mol_type = other DNA
ggttgaggtgggtggatta

SEQ ID NO: 722 - DNA, 30 bp, synthetic construct
  source 1..30: mol_type = other DNA
ttttttttttttttttttaaaataaaatct

SEQ ID NO: 723 - DNA, 20 bp, synthetic construct
  source 1..20: mol_type = other DNA
gggtgtttgtaattttagtt

SEQ ID NO: 724 - DNA, 23 bp, synthetic construct
  source 1..23: mol_type = other DNA
acctttaacaacctaacaatata

SEQ ID NO: 725 - DNA, 21 bp, synthetic construct
  source 1..21: mol_type = other DNA
gggtagatgatatggtagtga

SEQ ID NO: 726 - DNA, 28 bp, synthetic construct
  source 1..28: mol_type = other DNA
aaaaaataaaaaataactaaaacaatat

SEQ ID NO: 727 - DNA, 22 bp, synthetic construct
  source 1..22: mol_type = other DNA
aggaagtgtttaagaagtagaa

SEQ ID NO: 728 - DNA, 23 bp, synthetic construct
  source 1..23: mol_type = other DNA
cctaaaactctaaatacaatctc

SEQ ID NO: 729 - DNA, 21 bp, synthetic construct
  source 1..21: mol_type = other DNA
tttttaatttttgtttgtatt

SEQ ID NO: 730 - DNA, 20 bp, synthetic construct
  source 1..20: mol_type = other DNA
aaaccacaatctatttctaa

SEQ ID NO: 731 - DNA, 23 bp, synthetic construct
  source 1..23: mol_type = other DNA
ttagaaaagaataattatagttg

SEQ ID NO: 732 - DNA, 19 bp, synthetic construct
  source 1..19: mol_type = other DNA
accctaaaaaaataaaatc

SEQ ID NO: 733 - DNA, 26 bp, synthetic construct
  source 1..26: mol_type = other DNA
ttgtattagtaaataaagtgtatttt

SEQ ID NO: 734 - DNA, 20 bp, synthetic construct
  source 1..20: mol_type = other DNA
aaccctttctacaaatctac

SEQ ID NO: 735 - DNA, 18 bp, synthetic construct
  source 1..18: mol_type = other DNA
aggggtgggtggaagaat

SEQ ID NO: 736 - DNA, 31 bp, synthetic construct
  source 1..31: mol_type = other DNA
ctcctcaataaaataaaaatcctaaaaaata

SEQ ID NO: 737 - DNA, 20 bp, synthetic construct
  source 1..20: mol_type = other DNA
gggttaattagttgttttat

SEQ ID NO: 738 - DNA, 21 bp, synthetic construct
  source 1..21: mol_type = other DNA
cctacaaatatatcacacact

SEQ ID NO: 739 - DNA, 21 bp, synthetic construct
  source 1..21: mol_type = other DNA
tttgttaaataggtggttaga

SEQ ID NO: 740 - DNA, 20 bp, synthetic construct
  source 1..20: mol_type = other DNA
acctcaacctcctaaataac

SEQ ID NO: 741 - DNA, 22 bp, synthetic construct
  source 1..22: mol_type = other DNA
tagggtttagagtaggaggtag

SEQ ID NO: 742 - DNA, 24 bp, synthetic construct
  source 1..24: mol_type = other DNA
caaaaaatataaatcaaaaacatc

SEQ ID NO: 743 - DNA, 21 bp, synthetic construct
  source 1..21: mol_type = other DNA
gggattataggtatttattat

SEQ ID NO: 744 - DNA, 22 bp, synthetic construct
  source 1..22: mol_type = other DNA
taaaaattaaaaatcatactta

SEQ ID NO: 745 - DNA, 20 bp, synthetic construct
  source 1..20: mol_type = other DNA
aagtgatttttagggagtgt

SEQ ID NO: 746 - DNA, 23 bp, synthetic construct
  source 1..23: mol_type = other DNA
tccataataacctcattttaata

SEQ ID NO: 747 - DNA, 19 bp, synthetic construct
  source 1..19: mol_type = other DNA
tttttggttgaggtttagt

SEQ ID NO: 748 - DNA, 21 bp, synthetic construct
  source 1..21: mol_type = other DNA
aaacaacacaactcttatcac

SEQ ID NO: 749 - DNA, 24 bp, synthetic construct
  source 1..24: mol_type = other DNA
tatggtgattaaagtataatagtt

SEQ ID NO: 750 - DNA, 21 bp, synthetic construct
  source 1..21: mol_type = other DNA
tcctaaataaaaaacaacata

SEQ ID NO: 751 - DNA, 23 bp, synthetic construct
  source 1..23: mol_type = other DNA
tgaaaatgtttttagtttttatt

SEQ ID NO: 752 - DNA, 22 bp, synthetic construct
  source 1..22: mol_type = other DNA
aaataccctacctcttatctaa

SEQ ID NO: 753 - DNA, 20 bp, synthetic construct
  source 1..20: mol_type = other DNA
gatggttaatttttttattt

SEQ ID NO: 754 - DNA, 19 bp, synthetic construct
  source 1..19: mol_type = other DNA
actccttcaacaaactaac

SEQ ID NO: 755 - DNA, 18 bp, synthetic construct
  source 1..18: mol_type = other DNA
aggggatatttttaggtt

SEQ ID NO: 756 - DNA, 23 bp, synthetic construct
  source 1..23: mol_type = other DNA
ccaatctattcctatataattaa

SEQ ID NO: 757 - DNA, 20 bp, synthetic construct
  source 1..20: mol_type = other DNA
aggagagtttggaaatatag

SEQ ID NO: 758 - DNA, 22 bp, synthetic construct
  source 1..22: mol_type = other DNA
caattctaaattaaaccttatt

SEQ ID NO: 759 - DNA, 23 bp, synthetic construct
  source 1..23: mol_type = other DNA
aataatggtagtagttttattag

SEQ ID NO: 760 - DNA, 21 bp, synthetic construct
  source 1..21: mol_type = other DNA
ttcctatattaacaacttaca

SEQ ID NO: 761 - DNA, 19 bp, synthetic construct
  source 1..19: mol_type = other DNA
ttttttggtagatttttat

SEQ ID NO: 762 - DNA, 25 bp, synthetic construct
  source 1..25: mol_type = other DNA
aaattaatttctattatttatatta

SEQ ID NO: 763 - DNA, 18 bp, synthetic construct
  source 1..18: mol_type = other DNA
aggtggttggggagagtg

SEQ ID NO: 764 - DNA, 28 bp, synthetic construct
  source 1..28: mol_type = other DNA
ccctaaaataaatcaaaaaaaaccttaa

SEQ ID NO: 765 - DNA, 19 bp, synthetic construct
  source 1..19: mol_type = other DNA
aggtttaggtggggtgaat

SEQ ID NO: 766 - DNA, 24 bp, synthetic construct
  source 1..24: mol_type = other DNA
taaaatcatcaaaatcccttaaaa

SEQ ID NO: 767 - DNA, 25 bp, synthetic construct
  source 1..25: mol_type = other DNA
tttttttttaggttataggagtatt

SEQ ID NO: 768 - DNA, 18 bp, synthetic construct
  source 1..18: mol_type = other DNA
atccccacaaaacacata

SEQ ID NO: 769 - DNA, 22 bp, synthetic construct
  source 1..22: mol_type = other DNA
tagggtaaatattgggattatt

SEQ ID NO: 770 - DNA, 20 bp, synthetic construct
  source 1..20: mol_type = other DNA
tttccacctcaaaacttaac

SEQ ID NO: 771 - DNA, 21 bp, synthetic construct
  source 1..21: mol_type = other DNA
gggtgtttgtatttttatatt

SEQ ID NO: 772 - DNA, 18 bp, synthetic construct
  source 1..18: mol_type = other DNA
acctcccaaaaccataac

SEQ ID NO: 773 - DNA, 20 bp, synthetic construct
  source 1..20: mol_type = other DNA
gatgtgagtggtgaggtggt

SEQ ID NO: 774 - DNA, 22 bp, synthetic construct
  source 1..22: mol_type = other DNA
caaacccttccaaaacataaac

SEQ ID NO: 775 - DNA, 20 bp, synthetic construct
  source 1..20: mol_type = other DNA
tgggattataggtatgtatt

SEQ ID NO: 776 - DNA, 25 bp, synthetic construct
  source 1..25: mol_type = other DNA
caatttcatttataaatataaatat

SEQ ID NO: 777 - DNA, 22 bp, synthetic construct
  source 1..22: mol_type = other DNA
aggggttggttatttttatttt

SEQ ID NO: 778 - DNA, 29 bp, synthetic construct
  source 1..29: mol_type = other DNA
tttttaatatttaatttttaccttcaact

SEQ ID NO: 779 - DNA, 20 bp, synthetic construct
  source 1..20: mol_type = other DNA
ggtaagttgtggatgtgagt

SEQ ID NO: 780 - DNA, 22 bp, synthetic construct
  source 1..22: mol_type = other DNA
aaaaaaaaccaaaccttatcta

SEQ ID NO: 781 - DNA, 19 bp, synthetic construct
  source 1..19: mol_type = other DNA
tttttaggatttgggttag

SEQ ID NO: 782 - DNA, 23 bp, synthetic construct
  source 1..23: mol_type = other DNA
aaccttataaataacaacaaaac

1.-58. (canceled)

59. A method of treating papillary thyroid cancer in a subject in need thereof, the method comprising:
(i) measuring decreased DNA methylation levels, relative to a control, at papillary thyroid carcinoma DNA methylation sites in an isolated DNA obtained from a thyroid nodule from the subject, wherein the papillary thyroid carcinoma DNA methylation sites, with respect to reference human genome assembly hg19, comprise:
(a) chromosome 10, position 112259015,
(b) chromosome 12, position 56115043, or
(c) chromosome 15, position 85402496; and
(ii) administering cabozantinib-S-malate, doxorubicin hydrochloride, lenvatinib mesylate, sorafenib tosylate, vandetanib, or a combination of two or more thereof to the subject having the decreased DNA methylation levels at the papillary thyroid carcinoma DNA methylation sites in step (i) to treat the papillary thyroid cancer.

60. The method of claim 59, further comprising measuring a decreased DNA methylation level, relative to a control, at a benign thyroid nodule DNA methylation site in an isolated DNA obtained from a thyroid nodule from the subject, wherein the benign thyroid nodule DNA methylation site, with respect to reference human genome assembly hg19, is chromosome 2, position 8793724.

61. The method of claim 59, further comprising measuring a decreased DNA methylation level, relative to a control, at a benign thyroid nodule DNA methylation site in an isolated DNA obtained from a thyroid nodule from the subject, wherein the benign thyroid nodule DNA methylation site, with respect to reference human genome assembly hg19, is chromosome 12, position 45610695.

62. The method of claim 59, wherein the papillary thyroid carcinoma DNA methylation sites are unmethylated.

63. The method of claim 59, wherein the control is a subject that does not have papillary thyroid cancer.

64. The method of claim 59, wherein the papillary thyroid carcinoma DNA methylation sites, with respect to human genome assembly hg19 is: (a) chromosome 10, position 112259015, (b) chromosome 12, position 56115043, (c) chromosome 15, position 85402496, or (d) a combination of two or more of (a)-(c).

65. The method of claim 59, wherein the isolated DNA is obtained from the thyroid nodule in the subject by a biopsy or a surgical resection.

66. The method of claim 59, wherein the subject: (a) is a woman; (b) is about 20 years old to about 55 years old; (c) has a mutated Ret proto-oncogene; (d) has a grandparent, parent, or sibling who has been diagnosed with thyroid cancer; (e) self-identifies as Caucasian or Asian; (f) has or has had breast cancer, or (g) is any combination of two or more of (a)-(f).

67. A method of measuring DNA methylation levels at papillary thyroid carcinoma DNA methylation sites in a human subject with thyroid carcinoma, the method comprising measuring decreased DNA methylation levels, relative to a control, at papillary thyroid carcinoma DNA methylation sites in an isolated DNA obtained from a thyroid nodule from the human subject, wherein the papillary thyroid carcinoma DNA methylation sites, with respect to reference human genome assembly hg19, comprise:
(a) chromosome 10, position 112259015,
(b) chromosome 12, position 56115043, or
(c) chromosome 15, position 85402496; and
measuring methylation levels comprises amplifying DNA by contacting the DNA with a primer complementary to a sequence at or within 1000 nucleotides of the chromosomal positions to produce amplicons thereof to measure methylation levels.

68. The method of claim 67, wherein the papillary thyroid carcinoma DNA methylation sites are unmethylated.

69. The method of claim 67, wherein the control is a subject that does not have papillary thyroid cancer.

70. The method of claim 67, further comprising measuring a decreased DNA methylation level, relative to a control, at a benign thyroid nodule DNA methylation site in an isolated DNA obtained from a thyroid nodule from the subject, wherein the benign thyroid nodule DNA methylation site, with respect to reference human genome assembly hg19, is chromosome 2, position 8793724.

71. The method of claim 67, further comprising measuring a decreased DNA methylation level, relative to a control, at a benign thyroid nodule DNA methylation site in an isolated DNA obtained from a thyroid nodule from the subject, wherein the benign thyroid nodule DNA methylation site, with respect to reference human genome assembly hg19, is chromosome 12, position 45610695.

72. The method of claim 67, wherein the isolated DNA is obtained from the thyroid nodule in the subject by a biopsy or a surgical resection.

73. The method of claim 67, wherein the papillary thyroid carcinoma DNA methylation sites are unmethylated.

74. A method of measuring DNA methylation levels at papillary thyroid carcinoma methylation sites in an isolated DNA obtained from a thyroid nodule in a human subject, the method comprising:
(i) contacting the isolated DNA with a bisulfite salt, thereby forming a reacted thyroid nodule DNA, and
(ii) measuring decreased DNA methylation levels, relative to a control, at papillary thyroid carcinoma DNA methylation sites by detecting the presence of uracil in the reacted thyroid nodule DNA; wherein the papillary thyroid carcinoma DNA methylation sites, with respect to reference human genome assembly hg19, comprise:
(a) chromosome 10, position 112259015,
(b) chromosome 12, position 56115043, or
(c) chromosome 15, position 85402496; and
measuring methylation levels comprises amplifying DNA by contacting the DNA with a primer complementary to a sequence at or within 1000 nucleotides of the chromosomal positions to produce amplicons thereof to measure methylation levels.

75. The method of claim 74, wherein the bisulfite salt is sodium bisulfite or ammonium bisulfite.

76. The method of claim 74, wherein the bisulfite salt is sodium bisulfite, potassium bisulfite, ammonium bisulfite, magnesium bisulfite, sodium metabisulfite, potassium metabisulfite, ammonium metabisulfite and magnesium metabisulfite.

77. The method of claim 74, wherein the control is a subject that does not have papillary thyroid cancer.

78. The method of claim 74, wherein the isolated DNA is obtained from the thyroid nodule in the subject by a biopsy or by a surgical resection.
